(19) United States
(12) Patent Application Publication
(10) Pub. No.: US 2006/0168683 A1
(43) Pub. Date: Jul. 27, 2006

(54) Insecticidal toxin complex fusion proteins

(75) Inventors: Timothy Denver Hey, Zionsville, IN (US); Thomas Meade, Zionsville, IN (US); Stephanie Love Burton, Indianapolis, IN (US); Donald Joseph Merlo, Carmel, IN (US); Qihua Cai, Westfield, IN (US); Haley Jo Moon, Fishers, IN (US); Joel Jay Sheets, Zionsville, IN (US); Aaron Todd Woosley, Fishers, IN (US)

Correspondence Address: SALIWANCHIK LLOYD & SALIWANCHIK;A PROFESSIONAL ASSOCIATION, PO BOX 142950, GAINESVILLE, FL, 32614-2950, US

(73) Assignee: Dow AgroSciences LLC, Indianapolis, IN (US)

(21) Appl. No.: 11/070,573

(22) Filed: Mar. 2, 2005

Related U.S. Application Data
(60) Provisional application No. 60/549,516, filed on Mar. 2, 2004.
(60) Provisional application No. 60/549,502, filed on Mar. 2, 2004.

(51) Int. Cl. A01H 1/00; C07K 14/415; C12N 15/82; C12N 5/04

(52) U.S. Cl. 800/279; 435/419; 435/468; 530/370

(57) ABSTRACT

The subject invention relates to insecticidal toxin complex (“TC”) fusion proteins and to polynucleotides that encode these fusion proteins. The subject invention also includes polynucleotides that encode the subject TC fusion proteins, and vectors comprising said polynucleotides. In some embodiments, the invention provides a fusion protein comprising a Class A protein, a Class B protein, and a Class C TC protein fused together to form a single protein. In some other embodiments, the invention provides a fusion protein comprising a Class B and a Class C TC proteins fused together. In the latter embodiments, the BC or CB fusion protein can be used to enhance or potentiate the anti-insect activity of a “Toxin A” or Class A protein. Heretofore, there was no expectation that such fusion proteins would properly function and retain their activity when fused together. The subject invention advantageously reduces the number of genes needed to transform plants. Thus, the subject invention also includes plants, cells (bacterial and plant cells for example), and seeds that comprise said polynucleotides. Said plants can produce fusion proteins of the subject invention, which convey insect resistance to said plants. The subject invention also includes methods of controlling pests (preferably insects and other plant pests) with fusion proteins of the subject invention.

### CROSS-REFERENCE TO RELATED APPLICATIONS

[0001] This application claims the benefit of provisional application Ser. No. 60/549,516, filed Mar. 2, 2004, and of provisional application Ser. No. 60/549,502, filed Mar. 2, 2004.

### INCORPORATION BY REFERENCE

[0002] The Sequence Listing for this application is on duplicate compact discs labeled “Copy 1” and “Copy 2.” Copy 1 and Copy 2 each contain only one file named “DAS-118XC1.ST25.txt” which was created on Mar. 1, 2005, and is 800 KB. The entire contents of each of the compact discs are incorporated herein by reference in their entireties.

### BACKGROUND

[0003] Billions of dollars are spent each year to control insect pests and additional billions are lost to the damage they inflict. Synthetic organic chemical insecticides have been the primary tools used to control insect pests but biological insecticides, such as the insecticidal proteins derived from Bacillus thuringiensis (B.t.), have played an important role in some areas. The ability to produce insect resistant plants through transformation with B.t. insecticidal protein genes has revolutionized modern agriculture and heightened the importance and value of insecticidal proteins and their genes.

[0004] Two different B.t. genes to be “stacked” so that a plant produces two different types of B.t. proteins. This has been done to increase the plant's spectrum of insect resistance and to prevent the development of insects that are resistant to a single type of B.t. protein. Compared to expressing a single gene, expressing multiple genes is relatively more involved. It is common in the generation of transgenic eukaryotes, including transgenic plants, that the coding regions for individual proteins are assembled and introduced as individual genes, with each having a separate set of promoter and transcriptional termination regions.

[0005] Toxin Complex (TC) proteins and genes, found primarily in bacteria of the genera Photorhabdus and Xenorhabdus but also in other bacterial genera such as Serratia, Pseudomonas, and Paenibacillus, are an important, relatively new source of insecticidal proteins and genes. There are at least three distinct classes of TC proteins. Native Class A TC proteins are approximately 280 kDa in size and possess insecticidal activity. Class B TC proteins (approximately 170 kDa) and Class C TC proteins (approximately 112 kDa) in combination enhance the insecticidal potency of Class A TC proteins but possess little to no insecticidal activity in the absence of a Class A TC protein. That is to say, Class B and Class C TC proteins in combination potentiate the insecticidal activity of Class A TC proteins. See e.g. US-2004-0208907 and WO 2004/067727 for a more detailed review of the art. Class A TC proteins possess insecticidal activity, alone, but this activity is relatively low. When a Class A TC protein is combined with a Class B and a Class C TC protein, they form a complex that is much more potent than the Class A TC protein alone.

[0006] The exact mechanism(s) of insecticidal action for TC proteins is not understood. It is possible that the proteins interact and/or assemble with each other during the course of killing the insect.

### BRIEF SUMMARY

[0007] The subject invention relates to insecticidal toxin complex (“TC”) fusion proteins and to polynucleotides that encode these fusion proteins. In some embodiments, the invention provides a fusion protein comprising a Class A protein, a Class B protein, and a Class C TC protein fused (in any order) together to form a single protein. In some other embodiments, the invention provides a fusion protein comprising a Class B TC protein and a Class C TC protein fused together. In the latter embodiments, the BC or CB fusion protein can be used to enhance or potentiate the anti-insect activity of a “Toxin A” or Class A protein.

[0008] The subject invention relates in part to the surprising discovery that fusion proteins of the subject invention have the same level of activity, as compared to the non-fused proteins. In some cases, the subject fusion proteins can have even better activity than the individual (non-fused) components. Even the finding that the activity was retained at the same levels as the non-fused proteins was surprising. Heretofore, there was no expectation that fused TC proteins would properly function and retain their activity (when fused together). This is due in part to lack of knowledge regarding whether these proteins could properly interact with each other when in a fused state. There was also no prior motivation to make such constructs and proteins.

[0009] The subject invention includes the subject fusion proteins, polynucleotides that encode the fusion proteins, and vectors comprising said polynucleotides. The subject invention also includes plants, cells (bacterial and plant cells for example), and seeds that comprise said polynucleotides. Said plants can produce fusion proteins of the subject invention, which convey insect resistance to said plants. The invention includes transgenic plants that express Class A, Class B, and Class C TC proteins as a single fusion protein. The invention also includes transgenic plants that express Class B and Class C TC proteins as a single fusion protein. The present invention provides a method of protecting a plant from an insect by expressing in the plant effective amounts of a fusion protein of the subject invention.

[0010] The subject invention includes methods of inhibiting/controlling pests (preferably insects and other plant pests) with fusion proteins of the subject invention. Methods of the subject invention include a method of protecting a plant from damage by insects wherein said method comprises expressing, in the plant, an effective amount of at least one type of fusion protein of the subject invention, wherein the fusion protein is produced as a single fusion protein. Thus, the present invention includes an improvement in a method of protecting a plant from insect damage wherein said method comprises expressing, in the plant, an effective amount of Toxin Complex (TC) Class A, Class B and Class C TC proteins, wherein the improvement comprises expressing at least two of said proteins as a single fusion protein. Methods of the subject invention also include a method of protecting a plant from insect damage wherein said method comprises expressing in the plant an effective amounts of the three types of TC proteins, wherein at least two of the TC proteins are translated from a single transcript. Further methods of the subject invention also include spray-on methods and the like, which are well known in the art. In the latter cases, the improvement of the subject invention comprises providing to an insect for ingestion a fusion protein of the subject invention, wherein said protein is applied to the plant (or the vicinity of the plant).

[0011] As discussed herein, and as will be apparent to one skilled in the art having the benefit of the subject disclosure, the subject invention provides many advantages. For example, methods mentioned above offer an advantage of reducing the number of “events” needed to produce transgenic, insect-resistant plants of the subject invention. These methods also provide for temporal and spatial synchrony of translation for interacting proteins, which is particularly advantageous for eukaryotic cells.

### BRIEF DESCRIPTION OF THE FIGURE

[0012] FIG. 1 shows surface plasmon resonance sensorgrams for binding of either TcdB2+TccC3 or 8920 fusion protein to immobilized XptA2.

### BRIEF DESCRIPTION OF THE SEQUENCES

[0013] SEQ ID NO:1 shows the DNA sequence of the fused coding region cassette in the plasmid was designated pDAB8920. The coding regions of TcdB2, the linker peptide, and TccC3 are represented by nucleotides 48-4469, 4470-4511 and 4512-7394 of SEQ ID NO:1, respectively.

[0014] SEQ ID NO:2 shows the “8920” polypeptide encoded by the fused gene in SEQ ID NO:1. The amino acid sequences of TcdB2, the linker peptide, and TccC3 are represented by amino acids 1-1474, 1475-1488 and 1489-2448 of SEQ ID NO:2 respectively.

[0015] SEQ ID NO:3 shows the joining oligonucleotide between the tcdB2 and tccC3 coding regions.

[0016] SEQ ID NO:4 shows the polypeptide linker fragment encoded by SEQ ID NO:3.

[0017] SEQ ID NO:5 is the amino acid sequence for the Class B TC protein TcdB 1.

[0018] SEQ ID NO:6 is the amino acid sequence for the Class B TC protein TcdB2.

[0019] SEQ ID NO:7 is the amino acid sequence for the Class B TC protein TcaC.

[0020] SEQ ID NO:8 is the amino acid sequence for the Class B TC protein XptC1_{wi}.

[0021] SEQ ID NO:9 is the amino acid sequence for the Class B TC protein XptB1_{xb}.

[0022] SEQ ID NO:10 is the amino acid sequence for the Class B TC protein PptB1₁₅₂₉.

[0023] SEQ ID NO:11 is the amino acid sequence for the Class B TC protein SepB.

[0024] SEQ ID NO:12 is the amino acid sequence for the Class C TC protein TccC1.

[0025] SEQ ID NO:13 is the amino acid sequence for the Class C TC protein TccC2.

[0026] SEQ ID NO:14 is the amino acid sequence for the Class C TC protein TccC3.

[0027] SEQ ID NO:15 is the amino acid sequence for the Class C TC protein TccC4.

[0028] SEQ ID NO:16 is the amino acid sequence for the Class C TC protein TccC5.

[0029] SEQ ID NO:17 is the amino acid sequence for the Class C TC protein XptB1_{wi}.

[0030] SEQ ID NO:18 is the amino acid sequence for the Class C TC protein XPtC1_{xb}.

[0031] SEQ ID NO:19 is an alternate (long) amino acid sequence for the Class C TC protein PptC1₁₅₂₉ encoded by Paenibacillus ORF6 (long).

[0032] SEQ ID NO:20 is an alternate (short) amino acid sequence for the Class C TC protein PptC1₁₅₂₉ encoded by Paenibacillus ORF6 (short).

[0033] SEQ ID NO:21 is the amino acid sequence for the Class C TC protein SepC.

[0034] SEQ ID NO:22 is the amino acid sequence for the Class A TC protein XptA1_{wi}.

[0035] SEQ ID NO:23 is the amino acid sequence for the Class A TC protein XptA2_{wi}.

[0036] SEQ ID NO:24 is the amino acid sequence for the Class A TC protein TcbA.

[0037] SEQ ID NO:25 is the amino acid sequence for the Class A TC protein TcdA.

[0038] SEQ ID NO:26 is the amino acid sequence for the Class A TC protein TcdA2.

[0039] SEQ ID NO:27 is the amino acid sequence for the Class A TC protein TcdA4.

[0040] SEQ ID NO:28 is the native nucleic acid sequence encoding the Class B TC protein TcdB 1.

[0041] SEQ ID NO:29 is the native nucleic acid sequence encoding the Class B TC protein TcdB2.

[0042] SEQ ID NO:30 is the native nucleic acid sequence encoding the Class B TC protein TcaC.

[0043] SEQ ID NO:31 is the native nucleic acid sequence encoding the Class B TC protein XptC1_{wi}.

[0044] SEQ ID NO:32 is the native nucleic acid sequence encoding the Class B TC protein XptB1_{xb}.

[0045] SEQ ID NO:33 is the native nucleic acid sequence encoding the Class B TC protein PptB1₁₅₂₉.

[0046] SEQ ID NO:34 is the native nucleic acid sequence encoding the Class C TC protein TccC1.

[0047] SEQ ID NO:35 is the native nucleic acid sequence encoding the Class C TC protein TccC2.

[0048] SEQ ID NO:36 is the native nucleic acid sequence encoding the Class C TC protein TccC3.

[0049] SEQ ID NO:37 is the native nucleic acid sequence encoding the Class C TC protein TccC4.

[0050] SEQ ID NO:38 is the native nucleic acid sequence encoding the Class C TC protein TccC5.

[0051] SEQ ID NO:39 is the native nucleic acid sequence encoding the Class C TC protein XptB1_{wi}.

[0052] SEQ ID NO:40 is the native nucleic acid sequence encoding the Class C TC protein XptC1_{xb}.

[0053] SEQ ID NO:41 is the native nucleic acid sequence encoding the Class C TC protein PptC1₁₅₂₉ ORF6 (long).

[0054] SEQ ID NO:42 is the native nucleic acid sequence encoding the Class C TC protein PptC1₁₅₂₉ ORF6 (short).

[0055] SEQ ID NO:43 is a nucleic acid sequence optimized for expression in plants that encodes the Class B TC protein TcdB2.

[0056] SEQ ID NO:44 is a nucleic acid sequence optimized for expression in plants that encodes the Class C TC protein TccC3.

[0057] SEQ ID NO:45 is the nucleic acid sequence encoding TcdB2/TccC3 fusion protein 8563 (also referred to as “8563”).

[0058] SEQ ID NO:46 is the amino acid sequence for TcdB2/TccC3 fusion protein 8563 (also referred to as “8563”).

[0059] SEQ ID NO:47 is the nucleic acid sequence encoding TcdB2/TccC3 fusion protein 8564.

[0060] SEQ ID NO:48 is the amino acid sequence for TcdB2/TccC3 fusion protein 8564.

[0061] SEQ ID NO:49 is the nucleic acid sequence encoding TcdB2/TccC3 fusion protein 8940.

[0062] SEQ ID NO:50 is the amino acid sequence for TcdB2/TccC3 fusion protein 8940.

[0063] SEQ ID NO:51 is the nucleic acid sequence encoding TcdB2/TccC3 fusion protein 8920.

[0064] SEQ ID NO:52 is the amino acid sequence for TcdB2/TccC3 fusion protein 8920.

[0065] SEQ ID NO:53 is the nucleic acid sequence encoding TcdB2/TccC3 fusion protein 8921.

[0066] SEQ ID NO:54 is the amino acid sequence for TcdB2/TccC3 fusion protein 8921.

[0067] SEQ ID NO:55 is the nucleic acid sequence encoding TcdB2/TccC3 fusion protein 8923.

[0068] SEQ ID NO:56 is the amino acid sequence for TcdB2/TccC3 fusion protein 8923.

[0069] SEQ ID NO:57 is the nucleic acid sequence encoding TcdB2/TccC3 fusion protein 8951.

[0070] SEQ ID NO:58 is the amino acid sequence for TcdB2/TccC3 fusion protein 8951.

[0071] SEQ ID NO:59 is the nucleic acid sequence encoding TcdB2/TccC3 fusion protein 8811.

[0072] SEQ ID NO:60 is the amino acid sequence for TcdB2/TccC3 fusion protein 8811.

[0073] SEQ ID NO:61 is the native nucleic acid sequence encoding the Class A TC protein XptA1_{wi}.

[0074] SEQ ID NO:62 is the native nucleic acid sequence encoding the Class A TC protein XptA2_{wi}.

[0075] SEQ ID NO:63 is the native nucleic acid sequence encoding the Class A TC protein TcbA.

[0076] SEQ ID NO:64 is the native nucleic acid sequence encoding the Class A TC protein TcdA.

[0077] SEQ ID NO:65 is the native nucleic acid sequence encoding the Class A TC protein TcdA2.

[0078] SEQ ID NO:66 is the native nucleic acid sequence encoding the Class A TC protein TcdA4.

[0079] SEQ ID NO:67 is the 8836 “BCA” triple fusion polynucleotide sequence.

[0080] SEQ ID NO:68 is the amino acid sequence of the 8836 “BCA” triple fusion protein encoded by SEQ ID NO:67.

### DETAILED DESCRIPTION OF THE INVENTION

[0081] The subject invention relates in part to the surprising discovery that Toxin Complex (“TC”) proteins retain their insecticidal activity when fused (or ligated) together. Heretofore, there was no expectation that such fusion proteins would properly function and retain their activity when fused together. As referred to herein, there are Class A, Class B, and Class C toxin complex or “TC” proteins. These individual proteins can also be referred to as polypeptide components of fusion proteins of the subject invention.

[0082] Thus, the subject invention includes insecticidal TC fusion proteins and to polynucleotides that encode these fusion proteins. In some embodiments, the invention provides a fusion protein comprising a Class A, a Class B, and a Class C TC protein (or polypeptide) fused or ligated (in any order) together to form a single fusion protein. In some other embodiments, the invention provides a fusion protein comprising a Class B and a Class C TC protein fused or ligated together. In the latter embodiments, the BC or CB fusion protein can be used to enhance or potentiate the anti-insect activity of a “Toxin A” protein.

[0083] Individual Class A, Class B, and Class C TC proteins, as the term is used herein, are known in the art. Such proteins include stand-alone toxins (Class A TC proteins) and potentiators (Class B and C TC proteins). Bacteria known to produce TC proteins include those of the following genera: Photorhabdus, Xenorhabdus, Paenibacillus, Serratia, and Pseudomonas. See, e.g., Pseudomonas syringae pv. Syringae B728a (GenBank Accession Numbers gi:23470933 and gi:23472543). Any of such TC proteins can be used as polypeptide components according to the subject invention.

[0084] As discussed above in the Background section, although “Toxin A” proteins have some insecticidal activity, alone, the high insecticidal potency of the “A+B+C” complex is much preferred for commercial applications of TC proteins. However, the mechanism(s) of action of TC proteins remains unknown. Likewise, it is unknown how (and if) each of the A, B, and C components interact with each other. Thus, there was no way to predict whether fusions of the subject invention would allow for proper functioning (in the insect gut) of the three components. Thus, it came with surprise that fused TC proteins are highly effective for controlling insects. There was no expectation that the subject fusions would be active (i.e., toxic) after ingestion by the target insect. It is shown herein that fusion proteins of the subject invention surprisingly function quite well in the insect gut.

[0085] Having shown that A-, B-, and C-type TC polypeptides, when produced as a fusion protein of the subject invention are still able to physically interact to form an active ABC complex, the subject fusion genes (that encode the subject TC fusion proteins) may be used to address technical challenges of coordinate expression of at least three genes. It was not previously suggested to fuse any of the A, B, or C components together in an attempt to address these challenges. The subject disclosure shows that it is now possible to address and alleviate technical challenges of coordinate expression of at least three genes by practicing the subject invention. These technical challenges are more significant in eukaryotes, such as plants. In prokaryotic cells it is common that the coding regions for proteins that interact with one another are arranged in sequential order and are transcribed into a single mRNA. Sequential translation of these coding regions results in synthesis of the respective proteins in close temporal and physical proximity to one another, thus ensuring that the partner proteins are available for efficient assembly into the complex. Eukaryotic cells are larger and structurally more complex than prokaryotic cells. The genome of eukaryotic cells is contained in the nucleus and mRNA must be transported outside of the nucleus to the cytoplasm where protein synthesis occurs. In eukaryotic cells, interacting proteins are usually encoded by separate genes and coding regions, and this can lead to non co-ordinate biosynthesis of both the mRNAs and the encoded proteins. Assembly of the partner proteins is thus affected by temporal and spatial disjunction; the separate proteins must find each other through a milieu of other proteins and escape degradation by intracellular proteases.

[0086] While each of introduced genes may be necessary for providing the desired phenotype in the resulting transgenic organism (e.g., in a transgenic plant one gene may confer insect resistance and another herbicide tolerance), it is not common to require an interaction among the transgenically expressed proteins to produce the desired phenotype. Such interactions can be difficult to engineer. For example, the introduction of multiple genes through transformation can result in undesirable outcomes due to non-linked integration sites, construct rearrangements or deletions, and non-compatible expression patterns of the individual genes.

[0087] Thus, the subject invention is an unexpected solution to expressing three interacting proteins in plants. It was not heretofore suggested that fused TC proteins be used as a solution to three-gene-plant-expression issues.

[0088] As will be apparent to one skilled in the art having the benefit of the subject disclosure, the subject invention provides many advantages. First, various fusions of the subject invention worked as well or even better than the individual counterparts at killing or otherwise inhibiting insects. Having shown that fusion proteins of the subject invention will effectively kill or inhibit target insects, there are many advantages associated with the subject novel approach of using fused TC genes. Some additional advantages of the subject invention are as follows.

[0089] The subject invention allows for a reduction in the number of independently expressed genes required to produce an insect resistant transgenic plant (from three TC genes to one or two fusion genes, in preferred embodiments). The corresponding reduction in size of the plant transformation construction may increase transformation frequency and overall recovery of transgenics. The stability of transgenic plants may be increased, as only one or two independent genes are required. The probability of recovering active transgenic plants may be increased due to an increase in the efficiency of active complex formation in plants.

[0090] The subject invention includes vectors comprising polynucleotides of the subject invention. The subject invention also includes plants, cells (bacterial and plant cells for example), and seeds that comprise said polynucleotides. Said plants can produce fusion proteins of the subject invention, which conveys insect resistance to said plants. The subject invention also includes methods of controlling pests (preferably insects and other plant pests) with fusion proteins of the subject invention.

[0091] Fused Gene and Protein Nomenclature.

[0092] In this application the following notation is used for fused genes and fusion proteins. The linkage between fused genes present in an operon, that is, between genes that are transcriptionally linked but encode separate and distinct proteins, is indicated with a hyphen, e.g. tcdB2-tccC3. The linkage between genes that have been joined by way of a linker, thereby fusing two or more coding regions into a single open reading frame, is indicated by a slash mark, e.g. tcdB2/tccC3. The linkage in the single fusion protein encoded by such a fused gene is also designated by a slash mark, e.g. TcdB2/TccC3. The same genes or proteins fused using different linkers are distinguished by a “V” designation. For example, tcdB2/tccC3 V1 and tcdB2/tccC3 V2 represent the same genes fused using different linkers, and which encode the fusion proteins TcdB2/TccC3 V1 and TcdB2/TccC3 V2 respectively. A “+” sign can also be used to indicate non-fused components, such as when non-fused B+C potentiating activity is compared to fused B/C activity.

[0093] As used herein, the terms “linker” and “linker sequence” refer to nucleotides used to join a first protein coding region to a subsequent, immediately following protein coding region, such that both the first and second (and/or subsequent) protein coding regions form a single longer protein coding region in the +1 reading frame, as defined by the open reading frame of the first protein coding region. Such linker or linker sequence therefore cannot include translation termination codons in the +1 reading frame. As a consequence of translation of the linker or linker sequence, the protein encoded by the first protein coding region is joined by one or more amino acids to the protein encoded by the second protein coding region. A linker is optional, as the polypeptide components can be ligated directly, without a linker sequence.

[0094] As used herein, reference to “isolated” polynucleotides and/or proteins, and “purified” proteins refers to these molecules when they are not associated with the other molecules with which they would be found in nature. Thus, reference to “isolated” and/or “purified” signifies the involvement of the “hand of man” as described herein. For example, a bacterial protein “gene” of the subject invention put into a plant for expression is an “isolated polynucleotide.” Likewise, a fusion protein, exemplified herein, produced by a plant is an “isolated protein.” The term “ligated” can also be used to signify involvement of the “hand of man.” That is, one polypeptide component can be synthetically joined or “ligated” to another polypeptide component to form a fusion protein of the subject invention.

[0095] A “recombinant” molecule refers to a molecule that has been recombined. When made in reference to a nucleic acid molecule, the term refers to a molecule that is comprised of nucleic acid sequences that are joined together by means of molecular biological techniques. The term “recombinant” when made in reference to a protein or a polypeptide refers to a protein molecule that is produced using one or more recombinant nucleic acid molecules.

[0096] The term “heterologous” when made in reference to a nucleic acid sequence refers to a nucleotide sequence that is ligated to, or is manipulated to become ligated to, a nucleic acid sequence to which it is not joined in nature, or to which it is joined at a different location in nature. The term “heterologous” therefore indicates that the nucleic acid molecule has been manipulated using genetic engineering, i.e. by human intervention. Thus, a fusion protein gene of the subject invention can be operably linked to a heterologous promoter (or a “transcriptional regulatory region” which means a nucleotide sequence capable of mediating or modulating transcription of a nucleotide sequence of interest, when the transcriptional regulatory region is operably linked to the sequence of interest). Preferred heterologous promoters can be plant promoters. A promoter and/or a transcriptional regulatory region and a sequence of interest (a fusion gene) are “operably linked” when the sequences are functionally connected so as to permit transcription of the sequence of interest to be mediated or modulated by the transcriptional regulatory region. In some embodiments, to be operably linked, a transcriptional regulatory region may be located on the same strand as the sequence of interest. The transcriptional regulatory region may in some embodiments be located 5′ of the sequence of interest. In such embodiments, the transcriptional regulatory region may be directly 5′ of the sequence of interest or there may be intervening sequences between these regions. The operable linkage of the transcriptional regulatory region and the sequence of interest may require appropriate molecules (such as transgenic activator proteins) to be bound to the transcriptional regulatory region, the invention therefore encompasses embodiments in which such molecules are provided, either in vitro or in vivo.

[0097] Fusion Proteins and Constructs of the Subject Invention.

[0098] In some embodiments, this invention relates to the fusion of a TC gene encoding a Class B TC protein to a TC gene encoding a Class C TC protein so that the fused gene produces a fused protein. The fusion can be direct, or a linker sequence may connect the two coding regions. The invention encompasses both BC fusions and CB fusions, i.e. the coding sequences can be fused in either order.

[0099] This invention also includes the fusion of a TC gene encoding a Class A TC protein, a gene encoding a Class B TC protein, and a TC gene encoding a Class C TC protein so that the fused gene produces a fused protein. The fusion can be direct, or a linker sequence may connect the two coding regions. The three components can be fused in any order, e.g. ABC, ACB, BAC, BCA, CAB, or CBA.

[0100] Thus, the subject invention includes ClassA/Class B/Class C TC fusion proteins, polynucleotides that encode ClassA/Class B/Class C TC fusion proteins, vectors comprising said polynucleotides, and plants, cells (bacterial and plant cells for example), and seeds that comprise said polynucleotides. Said plants can produce fusion proteins of the subject invention, which convey insect resistance to said plants. These embodiments reduce by two thirds the number of transcriptional control sequences required for expression in plants and other organisms and eliminates the disadvantages that accompany transformation of separate, complete genes. These embodiments also provide a mechanism for maintaining physical and temporal synchrony of translation for interacting proteins, particularly in eukaryotic cells.

[0101] The subject invention also includes Class B/Class C TC fusion proteins, polynucleotides that encode Class B/Class C TC fusion proteins, vectors comprising said polynucleotides, and plants, cells (bacterial and plant cells for example), and seeds that comprise said polynucleotides. Said plants can produce fusion proteins of the subject invention, which, when combined with Class A TC proteins, convey insect resistance to said plants. These embodiments reduce by at least half the number of transcriptional control sequences required for expression in plants and other organisms and eliminates the disadvantages that accompany transformation of separate, complete genes. These embodiments also provide a mechanism for maintaining physical and temporal synchrony of translation for interacting proteins, particularly in eukaryotic cells.

[0102] In some cases, the primary translation product of the fused coding regions remains largely intact and contains the activities associated with the encoded polypeptide components of the fusion protein. In other cases, the primary translation product contains a protease cleavage site(s) that is engineered into the polypeptide linker positioned between the coding sequences for the separate polypeptides. This protease cleavage site provides for the release of the polypeptide components when the primary translation product is exposed to the appropriate protease.

[0103] Restriction sites, for example, can also be engineered in the linkers, for example. In one specifically exemplified embodiment, the joining polypeptide segment between the XptA2 and TcdB2 protein domains encodes the polypeptide linker fragment shown in SEQ ID NO: 59. The linker polypeptide is nine amino acids in length and contains charged and hydrophilic amino acids flanked by proline residues. Unique recognition sites for the restriction enzymes Avr II and Spe I are contained within the corresponding, encoding oligonucleotide segment.

[0104] For some of the Examples presented below, the coding sequences for the Class B and Class C TC proteins are joined through a specially designed linker. More specifically, this Example describes a fusion of the coding regions of tcdB2 (a gene encoding a Class B TC protein) and tccC3 (a gene encoding a Class C TC protein). The fused Class B/Class C gene encodes a single polypeptide. The coding regions were joined by a short oligonucleotide segment that encodes a linker peptide. The linker peptide was engineered to allow appropriate folding of the linked Class B and Class C TC proteins and to provide accessible protease sensitive sites between the fused Class B and Class C proteins. Details of the construction of the gene used to encode the new TcdB2/TccC3 VI fusion protein are disclosed below.

[0105] In one of these Examples, lysates containing the fused TcdB2/TccC3 V1 protein are comparable in potentiating activity to lysates of cells programmed to express the non-fused potentiator genes tcdB2 and tccC3. In another of these Examples, lysates of cells programmed to express the fused coding region tcdB2/tccC3 V1 are tested in bioassay with two Class A TC proteins; TcdA (coleopteran active) and XptA2_{wi} (lepidopteran active). It is shown that such lysates containing the fused TcdB2/TccC3 V1 protein are comparable in potentiating activity to lysates of cells programmed to express the non-fused potentiator genes tcdB2 and tccC3.

[0106] In a further Example, the coding sequences for Class A, Class B, and Class C TC proteins are joined through linkers. This Example describes a fusion of the coding region for the Class A TC protein XptA2 with the above-described tcdB2/tccC3 V1 fusion. Lysates containing the XptA2/TcdB2/TccC3 V1 fusion protein demonstrated excellent functional activity.

[0107] Administration of Fusion Proteins.

[0108] The subject invention can be performed in many different ways. For example, a plant can be engineered to produce two types of Class A TC proteins and a Class B/Class C fusion protein. Every cell of the plant, or every cell in a given type of tissue (such as roots or leaves) can have genes to encode the two A proteins and the Class B/Class C fusion protein. Alternatively, different cells of the plant can produce only one (or more) of each of these proteins. In this situation, when an insect bites and eats tissues of the plant, it could eat a cell that produces the first Class A TC protein, another cell that produces the second Class A TC protein, and another cell that produces the Class B/Class C fusion protein. Thus, what would be important is that the plant (not necessarily each plant cell) produces two Class A TC proteins and the Class B/Class C fusion protein of the subject invention so that insect pests eat all four of these proteins when they eat tissue of the plant.

[0109] Aside from transgenic plants, there are many other ways of administering the proteins, in a combination of the subject invention, to the target pest. Spray-on applications are known in the art. Some or all of the Class A and Class B/Class C fusion proteins can be sprayed (the plant could produce one or more of the proteins and the others could be sprayed). Various types of bait granules for soil applications, for example, are also known in the art and can be used according to the subject invention.

[0110] Many combinations of various Class A, Class B, and/or Class C TC proteins can now be fused in surprising, new ways. One example set forth herein shows the use of TcdB2/TccC3 fusions to enhance the activities of XptA2 and TcdA. The use of these and other combinations will now be apparent to those skilled in the art having the benefit of the subject disclosure. See US-2004-0208907 and WO 2004/067727. Accordingly, the subject invention includes fusions of “mixed pairs” of potentiators such as a Class A gene from Xenorhabdus, with a Class B gene from Photorhabdus and a Class C gene from Xenorhabdus. The Class A gene can also be omitted, so the subject invention includes fusions of “mixed pairs” of potentiators such as a Class B gene from Photorhabdus and a Class C gene from Xenorhabdus. Thus, such “heterologous” combinations of “Toxin A”s and/or potentiators can be selected to maximize their ability to enhance two (for example) insecticidal proteins. That is, one might find that, for a given use, a fusion of TcdB1 (Class B) and XptB1_{wi} (Class C) is a more desirable than is XptC1_{wi} (Class B) and XptB1_{wi} (Class C), for example. Likewise, the subject invention includes “ABC”-type fusions where the A, B, and or C are derived from different types of organisms.

[0111] The subject invention provides one skilled in the art with many surprising advantages. These advantages can be used in combination with the invention of US-2004-0208907 and WO 2004/067727, for example. Among the advantages is that one skilled in the art will now be able to use a single pair of fused potentiators to enhance the activity of a stand-alone Xenorhabdus protein toxin, for example, as well as a stand-alone Photorhabdus protein toxin, for example. (As one skilled in the art knows, Xenorhabdus toxin proteins tend to be more desirable for controlling lepidopterans while Photorhabdus toxin proteins tend to be more desirable for controlling coleopterans.) This reduces the number of genes (and transformation events) needed to be expressed by a transgenic plant to achieve effective control of a wider spectrum of target pests.

[0112] The subject invention also includes the use of a transgenic plant producing a subject TC fusion protein combination together with one or more Bacillus thuringiensis Cry proteins, for example. The subject fusion proteins can also be otherwise administered (by spray-on applications, for example) with other insecticidal toxins.

[0113] Toxin Complex (TC) Protein Components of the Subject TC Fusion Proteins.

[0114] In light of the subject disclosure, one skilled in the art will now have a reasonable expectation that a wide variety of “A,” “B,” and/or “C” components can be used according to the subject invention, and that the subject invention is not limited to the embodiments specifically exemplified. For example, where particular Photorahabdus A, B, and/or C polypeptides are exemplified, one will know that other Photorhabdus TC proteins could be used or substituted. Likewise, corresponding Xenorhabdus TC polypeptides can be used, in place of the exemplified Photorhabdus polypeptides, to form fusion proteins of the subject invention. See e.g. US-2004-0208907 and WO 2004/067727.

[0115] The subject invention provides fused TC proteins. Two main embodiments are “BC” fusions and “ABC” fusions. However, it should be noted that BC-type fusions include C-to-B fusions, and that “ABC” fusions are not limited to A-to-B-to-C fusions. Various other possible arrangements and orientations are discussed in more detail below.

[0116] “BC” (or “CB”) fusion proteins of the subject invention are typically in the molecular weight range of approximately 220 kDa to approximately 295 kDa, depending on the exact “B” and “C” components (and linkers if any) that are selected for use according to the subject invention. A preferred weight, for example, is in the approximate range of 280-285 kDa. The individual B and C components of the subject BC fusion protein (which potentiate a Class A toxin) can be defined in several ways, as discussed in more detail below.

[0117] “ABC” fusion proteins of the subject invention (including ACB fusions, for example) are typically in the molecular weight range of approximately 450 kDa to approximately 590 kDa, depending on the exact A, B, and C components (and linkers if any) that are selected for use according to the subject invention. A preferred weight, for example, is in the approximate range of 560-565 kDa. The individual A, B, and C components can be defined in several ways, as discussed in more detail below.

[0118] As used herein, a “Class A TC protein” is a 230-290 kDa TC protein that has stand alone insecticidal activity, and has an amino acid sequence at least 40% identical to a sequence selected from XptA1_{wi} (SEQ ID NO:22), XptA2_{wi} (SEQ ID NO:23), TcbA (SEQ ID NO:24), TcdA (SEQ ID NO:25), TcdA2 (SEQ ID NO:26), and TcdA4 (SEQ ID NO:27).

[0119] Unless otherwise specified, as used herein, percent sequence identity and/or similarity of two nucleic acids is determined using the algorithm of Karlin and Altschul (1990), Proc. Natl. Acad. Sci. USA 87:2264-2268, modified as in Karlin and Altschul (1993), Proc. Natl. Acad. Sci. USA 90:5873-5877. Such an algorithm is incorporated into the NBLAST and XBLAST programs of Altschul et al. (1990), J. Mol. Biol. 215:402-410. BLAST nucleotide searches are performed with the NBLAST program, score=100, wordlength=12. Gapped BLAST can be used as described in Altschul et al. (1997), Nucl. Acids Res. 25:3389-3402. When utilizing BLAST and Gapped BLAST programs, the default parameters of the respective programs (NBLAST and XBLAST) are used. See NCBI/NIH website. The scores can also be calculated using the methods and algorithms of Crickmore et al. as described in the Background section, above.

[0120] To obtain gapped alignments for comparison purposes, the AlignX function of Vector NTI Suite 8 (InforMax, Inc., North Bethesda, Md., U.S.A.), was used employing the default parameters. These were: a Gap opening penalty of 15, a Gap extension penalty of 6.66, and a Gap separation penalty range of 8. Two or more sequences can be aligned and compared in this manner or using other techniques that are well-known in the art. By analyzing such alignments, relatively conserved and non-conserved areas of the subject polypeptides can be identified. This can be useful for, for example, assessing whether changing a polypeptide sequence by modifying or substituting one or more amino acid residues can be expected to be tolerated.

[0121] Examples of Class A TC proteins are set forth herein in SEQ ID NOs:22-25. The examples include TcbA and TcdA from Photorhabdus, XptA1 and XptA2 from Xenorhabdus, and SepA from Serratia entomophila (GenBank Accession No. AAG09642.1). Class A TC proteins can be ˜230 kDa (especially if truncated), ˜250-290 kDa, ˜260-285 kDa, and ˜270 kDa, for example. It was known that the Class A TC protein TcdA is active, alone, against Manduca sexta.

[0122] Sequence identity comparisons for known Class A TC proteins are provided in

[0123] Table 1

[0124] These comparisons demonstrate that 40% sequence identity is an appropriate criterion for defining Class A TC proteins.

TABLE 1
Sequence identity comparisons for Class A TC proteins

| | | | | | | |
|---|---|---|---|---|---|---|
| TcdA | TcdA2 | TcdA4 | TcbA | XptA1_{wi} | XptA2_{wi} | SepA |
| % | % | % | % | % | % | % |
| Identity | Identity | Identity | Identity | Identity | Identity | Identity |

Photorhabdus luminescens A Class

| | | | | | | | |
|---|---|---|---|---|---|---|---|
| TcdA | 100.0 | 55.0 | 68.0 | 50.1 | 46.3 | 40.6 | 40.7 |
| TcdA2 | | 100.0 | 55.9 | 42.4 | 41.3 | 36.8 | 34.7 |
| TcdA4 | | | 100.0 | 49.4 | 44.4 | 38.7 | 38.7 |
| TcbA | | | | 100.0 | 43.7 | 40.8 | 40.2 |

Xenorhabdus nematophilus xwi A Class

| | | | |
|---|---|---|---|
| XptA1_{wi} | 100.0 | 44.2 | 46.6 |
| XptA2_{wi} | | 100.0 | 38.2 |

Serratia entomophila A Class

| | |
|---|---|
| SepA | 100.0 |

[0125] Some Class A TC proteins can be defined and/or characterized by a polynucleotide that encodes the protein is encoded by a polynucleotide. Such polynucleotides can be identified by their ability to hybridize (under stringent conditions) with a nucleic acid selected from SEQ ID NOs:61-66. Stated another way, a Class A polypeptide component of the subject invention can be encoded by a polynucleotide that hybridizes with the complement of a polynucleotide that codes for a polypeptide selected from SEQ ID NOs:22-27. It should be noted that DNA sequences can be optimized, for example, for expression in plants, and that some degree of variation is within the subject invention.

[0126] Examples of Class A TC proteins are set forth herein in SEQ ID NOs:22-27. The examples include TcbA and TcdA from Photorhabdus, XptA1 and XptA2 from Xenorhabdus, and SepA from Serratia entomophila (GenBank Accession No. AAG09642.1). Class A TC proteins can be ˜230 kDa (especially if truncated), ˜250-290 kDa, ˜260-285 kDa, and ˜270 kDa, for example. It was known that the Class A TC protein TcdA is active, alone, against Manduca sexta.

[0127] In addition to those specifically identified in SEQ ID NOs:22-27, Class A TC proteins include, for example:

[0128] 1) proteins obtained from wild type organisms;

[0129] 2) variants arising from mutations;

[0130] 3) variants designed by making conservative amino acid substitutions; and

[0131] 4) variants produced by random fragmentation and reassembly of a plurality of different sequences that encode Class A TC proteins (DNA shuffling).

See e.g. U.S. Pat. No. 5,605,793.

[0132] The DNA sequences encoding the Class A TC proteins can be wild type sequences, mutant sequences, or synthetic sequences designed to express a predetermined Class A TC protein. DNA sequences designed to be highly expressed in plants by, for example, avoiding polyadenylation signals, and using plant-preferred codons, are particularly useful. Examples of plant optimized nucleic acids encoding Class A TC proteins are disclosed, for example, in U.S. Pat. No. 6,590,142.

[0133] As used herein, a “Class B TC protein” is a 130-180 kDa protein having an amino acid sequence with at least 40% identity to a sequence selected from the group consisting of:
[0134] TcdB1 (SEQ ID NO:5),
[0135] TcdB2 (SEQ ID NO:6),
[0136] TcaC (SEQ ID NO:7),
[0137] XptC1_{wi} (SEQ ID NO:8),
[0138] XptB1_{xb} (SEQ ID NO:9),
[0139] PptB1₁₅₂₉ (SEQ ID NO:10),and
[0140] Sep B (SEQ ID NO:11),
   said protein being capable of increasing the toxicity of a Class A TC protein when used in combination with a Class C TC protein (as defined below).

[0141] Sequence identity comparisons for known Class B TC proteins are provided in Table 2. These comparisons demonstrate that 40% sequence identity is an appropriate criterion for defining Class B TC proteins.

TABLE 2
Sequence identity comparisons for known Class B TC proteins.

| | | | | | | |
|---|---|---|---|---|---|---|
| | | | | | PptB1 | |
| TcdB1 | TcdB2 | TcaC | XptC1_{wi} | XptB1_{xb} | (Orf5) | SepB |
| % | % | % | % | % | % | % |
| Identity | Identity | Identity | Identity | Identity | Identity | Identity |

Photorhabdus luminescens B Class

| | | | | | | | |
|---|---|---|---|---|---|---|---|
| TcdB1 | 100.0 | 75.6 | 58.2 | 50.2 | 54.6 | 42.3 | 52.6 |
| TcdB2 | | 100.0 | 57.2 | 49.8 | 53.3 | 42.0 | 51.4 |
| TcaC | | | 100.0 | 51.6 | 59.8 | 42.6 | 50.1 |

Xenorhabdus nematophilus xwi B Class

| | | | | |
|---|---|---|---|---|
| XptC1_{wi} | 100.0 | 53.2 | 40.7 | 47.8 |

Xenorhabdus bovienii B Class

| | | | |
|---|---|---|---|
| XptB1_{xb} | 100.0 | 40.6 | 46.0 |

Paenibacillus spp str 1529 B Class

| | | |
|---|---|---|
| PptB1 (Orf5) | 100.0 | 38.7 |

Serratia entomophila B Class

| | |
|---|---|
| SepB | 100.0 |

[0142] Class B TC proteins of the subject invention can be encoded by a polynucleotide having a complement that hybridizes under stringent conditions with a nucleic acid of one of SEQ ID NOs:28-33. Stated another way, a Class B polypeptide component of the subject invention can be encoded by a polynucleotide that hybridizes with the complement of a polynucleotide that codes for a polypeptide selected from SEQ ID NOs:5-11. It should be noted that DNA sequences can be optimized, for example, for expression in plants, and that some degree of variation is within the subject invention.

[0143] Examples of the Class B TC proteins are set forth herein in SEQ ID NOs:5-11.

[0144] The examples include TcaC, TcdB1, and TcdB2 from Photorhabus, XptC1_{wi} and XptB1_{xb} from Xenorhabdus, PptB1₁₅₂₉ from Paenibacillus (the protein product of ORF5 of Paenibacillus strain DAS1529), and SepB from Serratia entomophila (GenBank Accession No. AAG09643.1; reproduced here as SEQ ID NO:11). Class B TC proteins are typically in the size range of about 170 kDa. Further examples of Class B TC proteins are TcaC homologs from Pseudomonas syringae pv. syringae B728a (GenBank Accession Numbers gi23472544 and gi23059431), and X. nematophilus PO ORF268 (encoded by bases 258-1991 of FIG. 2 of WO 20/004855). A preferred Class B TC protein is TcdB2 (SEQ ID NO:6). Class B TC proteins can be ˜130-180 kDa, ˜140-170 kDa, ˜150-165 kDa, and ˜155 kDa, for example.

[0145] In addition to those specifically identified in SEQ ID NOs:5-11, Class B TC proteins include, for example:

[0146] 1) proteins obtained from wild type organisms;

[0147] 2) variants arising from mutations;

[0148] 3) variants designed by making conservative amino acid substitutions; and

[0149] 4) variants produced by random fragmentation and reassembly of a plurality of different sequences that encode Class B TC proteins (DNA shuffling).

See e.g. U.S. Pat. No. 5,605,793.

[0150] The DNA sequences encoding the Class B TC proteins can be wild type sequences, mutant sequences, or synthetic sequences designed to express a predetermined Class B TC protein. DNA sequences designed to be highly expressed in plants by, for example, avoiding polyadenylation signals, and using plant preferred codons, are particularly useful.

[0151] As used herein a “Class C TC protein” is a 90-112 kDa potentiator having an amino acid sequence with at least 35% identity to a sequence selected from the group consisting of
[0152] TccC1 (SEQ ID NO:12),
[0153] TccC2 (SEQ ID NO:13),
[0154] TccC3 (SEQ ID NO:14),
[0155] TccC4 (SEQ ID NO:15),
[0156] TccC5 (SEQ ID NO:16),
[0157] XptB1_{wi} (SEQ ID NO:17),
[0158] XPtC1_{xb} (SEQ ID NO:18),
[0159] PptC1(long) (SEQ ID NO:19),
[0160] PptC1(short) (SEQ ID NO:20), and
[0161] SepC (SEQ ID NO:21);
   said protein being capable of increasing the toxicity of a Class A TC protein when used in combination with a Class B TC protein.

[0162] Table 3 provides sequence identity comparisons for known Class C TC proteins. The comparisons demonstrate that 35% sequence identity is an appropriate criterion in defining Class C TC proteins.

TABLE 3
Sequence identity comparisons for known Class C TC proteins.

| | | | | | | | | | |
|---|---|---|---|---|---|---|---|---|---|
| | | | | | | | PptC1 | PptC1 | |
| | | | | | | | (Orf6 | (Orf6 | |
| TccC1 | TccC2 | TccC3 | TccC4 | TccC5 | XptB1_{wi} | XptC1_{xb} | long) | short) | SepC |
| % | % | % | % | % | % | % | % | % | % |
| Identity | Identity | Identity | Identity | Identity | Identity | Identity | Identity | Identity | Identity |

Photorhabdus luminescens C Class

| | | | | | | | | | | |
|---|---|---|---|---|---|---|---|---|---|---|
| TccC1 | 100.0 | 48.1 | 52.8 | 52.9 | 51.3 | 45.5 | 46.5 | 35.0 | 35.7 | 44.1 |
| TccC2 | | 100.0 | 52.5 | 53.7 | 61.4 | 44.1 | 47.2 | 35.3 | 36.1 | 46.1 |
| TccC3 | | | 100.0 | 59.5 | 58.4 | 46.0 | 48.1 | 35.4 | 36.1 | 46.6 |
| TccC4 | | | | 100.0 | 57.2 | 44.8 | 49.1 | 36.9 | 37.7 | 45.3 |
| TccC5 | | | | | 100.0 | 45.6 | 48.7 | 35.2 | 36.0 | 44.9 |

Xenorhabdus nematophilus xwi C Class

| | | | | | |
|---|---|---|---|---|---|
| XptB1_{wi} | 100.0 | 41.4 | 32.7 | 33.5 | 46.3 |

Xenorhabdus bovienii C Class

| | | | | |
|---|---|---|---|---|
| XptC1_{xb} | 100.0 | 35.4 | 36.2 | 43.5 |

Paenibacillus spp str 1529 C Class

| | | | |
|---|---|---|---|
| PptC1 (Orf6 long) | 100.0 | 97.6 | 34.9 |
| PptC1 (Orf6 short) | | 100.0 | 35.7 |

Serratia entomophila C Class

| | |
|---|---|
| SepC | 100.0 |

[0163] A typical Class C TC protein is encoded by a polynucleotide that hybridizes under stringent conditions with a nucleic acid of one of SEQ ID NOs:34-42. Stated another way, a Class C polypeptide component of the subject invention can be encoded by a polynucleotide that hybridizes with the complement of a polynucleotide that codes for a polypeptide selected from SEQ ID NOs:12-21. It should be noted that DNA sequences can be optimized, for example, for expression in plants, and that some degree of variation is within the subject invention.

[0164] Examples of the Class C TC proteins are set forth herein in SEQ ID NOs:12-21. The examples include TccC1 and TccC3 from Photorhabdus, XptB1_{wi} and XptC1_{xb} from Xenorhabdus, PptC1₁₅₂₉ from Paenibacillus (the protein product of ORF6 of Paenibacillus strain DAS1529), and SepC from Serratia entomophila (GenBank Accession No. AAG09644.1; reproduced here as SEQ ID NO:21). Proteins in this class are typically in the size range of about 112 kDa. Further examples of Class C TC proteins are TccC homologs from Pseudomonas syringae pv. syringae B728a (GenBank Accession Numbers gi:23470227, gi:23472546, gi:23472540, gi:23472541, gi:23468542, gi:23472545, gi:23058175, gi:23058176, gi:23059433, gi:23059435, and gi:23059432). A preferred Class C TC protein is TccC3 (SEQ ID NO:14). Class C TC proteins can be ˜90-120 kDa, ˜95-115 kDa, ˜100-110 kDa, and ˜105-107 kDa, for example.

[0165] In addition to those specifically identified in SEQ ID NOs:12-21, Class C TC proteins include:

[0166] 1) proteins obtained from wild type organisms;

[0167] 2) variants arising from mutations;

[0168] 3) variants designed by making conservative amino acid substitutions; and

[0169] 4) variants produced by random fragmentation and reassembly of a plurality of different Class C coding sequences (DNA shuffling).

[0170] The DNA sequences encoding the Class C TC proteins can be wild type sequences, mutant sequences, or synthetic sequences designed to express a predetermined Class C TC protein. DNA sequences designed to be highly expressed in plants by, for example, avoiding polyadenylation signals, and using plant preferred codons, are particularly useful.

[0171] Some further examples of components for use according to the subject invention (and their relatedness to each other) include:

### Class A Proteins

[0172] Photorhabdus TcdA toxin homologs

| | | Sequence identity |
|---|---|---|
| | | to W-14 TcdA |
| | | (GenBank Accession |
| Name | Reference | NO. AAF05542.1) |
| P.1.Hph2 | SEQ ID NO: 13 of U.S. 6,281,413B1 | ˜93% |
| P.1. Hph3 | Encoded by bases 2416 to 9909 of | ˜57% |
| | SEQ ID NO: 11 of U.S. 6,281,413B1 | |

Photorhabdus TcbA toxin homologs

| | | Sequence identity |
|---|---|---|
| | | to W-14 TcdA |
| | | (GenBank Accession |
| Name | Reference | NO. AAF05542.1) |
| P.1. W-14 | GenBank Accession No. | (˜50% sequence identity |
| TcbA | AAC38627.1 (reproduced | to W-14 TcdA) |
| | here as SEQ ID NO: 24) | |

Xenorhabdus XptA1 toxin homologs

| | | Sequence identity to Xwi XptA1 |
|---|---|---|
| | | (disclosed herein |
| Name | Reference | as SEQ ID NO: 22) |
| X.n XptA1 | GenBank Accession No. | ˜96% |
| | CAC38401.1 (AJ308438) | |

Xenorhabdus XptA2 toxin homologs

| | | Sequence identity to Xwi XptA2 |
|---|---|---|
| | | (disclosed herein |
| Name | Reference | as SEQ ID NO: 23) |
| X.n. XptA2 | GenBank Accession No. | ˜95% |
| | CAC38404.1 (AJ308438) | |

### Class B TC Proteins

[0173] Photorhabdus ˜170 kDa Potentiators

| | | Sequence identity to TcdB |
|---|---|---|
| | | (GenBank Accession No. |
| Name | Identifier | AAL18487.1) |
| P.1. ORF2 | SEQ ID NO: 14 of U.S. | ˜93% |
| | 6,281,413B1 | |
| P.1. ORF4 | Encoded by bases 9966 to 14633 | ˜71% |
| | of SEQ ID NO: 11 of U.S. | |
| | 6,281,413B1 | |

Xenorhabdus ˜170 kDa Potentiators

| | | Sequence identity to XptC1_{wi} |
|---|---|---|
| | | (disclosed herein |
| Name | Identifier | as SEQ ID NO: 8) |
| X.n. XptC1 | GenBank Accession No. | ˜90% |
| | CAC38403.1 | |

### Class C TC Proteins

[0174] Photorhabdus ˜112 kDa Potentiators

| | | Sequence identity to TccC1 |
|---|---|---|
| | | (GenBank Accession No. |
| Name | Identifier | AAC38630.1) |
| P.1. ORF5 | SEQ ID NO: 12 of U.S. | ˜51% |
| | 6,281,413B1 | |

Xenorhabdus ˜112 kDa Potentiators

| | | Sequence identity to XptB1_{wi} |
|---|---|---|
| | | (disclosed herein |
| Name | Identifier | as SEQ ID NO: 17) |
| X.n. XptB1 | GenBank Accession | ˜96% |
| | No. CAC38402 | |
| X.nem. P2-ORF | Encoded by bases | ˜48% |
| 2071 | 2071 to 4929 of FIG. 2 | |
| | of WO 20/004855 | |

[0175] Certain Class A, Class B, and Class C TC proteins useful in the fusion protein of the present invention have been specifically exemplified herein. As these proteins are merely exemplary of the proteins useful in the subject invention, it should be readily apparent that the subject invention comprises use of variant or equivalent proteins (and nucleotide sequences coding for equivalents thereof) having the same or similar functionality as the exemplified proteins. Equivalent proteins will have amino acid similarity (and/or homology) with an exemplified TC protein. Preferred polynucleotides and proteins of the subject invention can be defined in terms of narrower identity and/or similarity ranges. For example, the identity and/or similarity of the Class A, B, and/or C TC protein can be 40, 41, 42, 43, 44, 45, 46, 47, 48, 49, 50, 51, 52, 53, 54, 55, 56, 57, 58, 59, 60, 61, 62, 63, 64, 65, 66, 67, 68, 69, 70, 71, 72, 73, 74, 75, 76, 77, 78, 79, 80, 81, 82, 83, 84, 85, 86, 87, 88, 89, 90, 91, 92, 93, 94, 95, 96, 97, 98, or 99% as compared to a sequence exemplified or suggested herein and, the identity and/or similarity of the Class C TC protein can be 35, 36, 37, 38, 39, 40, 41, 42, 43, 44, 45, 46, 47, 48, 49, 50, 51, 52, 53, 54, 55, 56, 57, 58, 59, 60, 61, 62, 63, 64, 65, 66, 67, 68, 69, 70, 71, 72, 73, 74, 75, 76, 77, 78, 79, 80, 81, 82, 83, 84, 85, 86, 87, 88, 89, 90, 91, 92, 93, 94, 95, 96, 97, 98, or 99% as compared to a sequence exemplified or suggested herein. Any number listed above can be used to define the upper and lower limits. For example, a Class B component of a fusion protein of the subject invention can be defined as having 50-90% identity with a given TcdB protein. Thus, a TcdB-like protein (and/or a tcdB-like gene) can be defined by any numerical identity score provided or suggested herein, as compared to any previously known TcdB protein, including any TcdB protein (and likewise with PptB or corresponding Xenorhabdus proteins) specifically exemplified herein.

[0176] The amino acid homology/similarity/identity will typically (but not necessarily) be highest in regions of the protein that account for its activity or that are involved in the determination of three-dimensional configurations that are ultimately responsible for the activity. In this regard, certain amino acid substitutions are acceptable and can be expected to be tolerated. For example, these substitutions can be in regions of the protein that are not critical to activity. Analyzing the crystal structure of a protein, and software-based protein structure modeling, can be used to identify regions of a protein that can be modified (using site-directed mutagenesis, shuffling, etc.) to actually change the properties and/or increase the functionality of the protein.

[0177] Various properties and three-dimensional features of the protein can also be changed without adversely affecting the toxin activity/functionality of the protein. Conservative amino acid substitutions can be expected to be tolerated/to not adversely affect the three-dimensional configuration of the molecule. Amino acids can be placed in the following classes: non-polar, uncharged polar, basic, and acidic. Conservative substitutions whereby an amino acid of one class is replaced with another amino acid of the same type fall within the scope of the subject invention so long as the substitution is not adverse to the biological activity of the compound. Table 4 provides a listing of examples of amino acids belonging to each class.

TABLE 4
Classes of amino acids.

| Class of Amino Acid | Examples of Amino Acids |
|---|---|
| Nonpolar | Ala, Val, Leu, Ile, Pro, Met, Phe, Trp |
| Uncharged Polar | Gly, Ser, Thr, Cys, Tyr, Asn, Gln |
| Acidic | Asp, Glu |
| Basic | Lys, Arg, His |

[0178] In some instances, non-conservative substitutions can also be made. The critical factor is that these substitutions must not significantly detract from the functional/biological/toxin activity of the protein.

[0179] Equivalent Class A, Class B, and/or Class C TC proteins and/or genes encoding these equivalent proteins can be obtained/derived from wild-type or recombinant bacteria and/or from other wild-type or recombinant organisms using the teachings provided herein. Other Bacillus, Serratia, Paenibacillus, Photorhabdus, and Xenorhabdus species, for example, can be used as source isolates.

[0180] There are a number of methods for obtaining the proteins for use according to the subject invention. For example, antibodies to the proteins disclosed herein can be used to identify and isolate other proteins from a mixture. Specifically, antibodies may be raised to the portions of the proteins which are most constant and most distinct from other proteins. These antibodies can then be used to specifically identify equivalent proteins with the characteristic activity by immunoprecipitation, enzyme linked immunosorbent assay (ELISA), or immuno-blotting. Antibodies to the proteins disclosed herein, or to equivalent proteins, or to fragments of these proteins, can be readily prepared using standard procedures. Such antibodies are an aspect of the subject invention. Proteins of the subject invention can be obtained from a variety of sources/source microorganisms.

[0181] One skilled in the art would readily recognize that proteins (and genes) of the subject invention can be obtained from a variety of sources. A protein “from” or “obtainable from” any of the subject isolates referred to or suggested herein means that the protein (or a similar protein) can be obtained from the isolate or some other source, such as another bacterial strain or a plant. “Derived from” also has this connotation, and includes proteins obtainable from a given type of bacterium that are modified for expression in a plant, for example. One skilled in the art will readily recognize that, given the disclosure of a bacterial gene and protein, a plant can be engineered to produce the protein. Antibody preparations, nucleic acid probes (DNA and RNA), and the like may be prepared using the polynucleotide and/or amino acid sequences disclosed herein and used to screen and recover other protein genes from other (natural) sources.

[0182] Proteins and genes for use according to the subject invention can be identified and obtained by using oligonucleotide probes, for example. These probes are detectable nucleotide sequences which may be detectable by virtue of an appropriate label or may be made inherently fluorescent as described in International Application No. WO 93/16094. The probes (and the polynucleotides of the subject invention) may be DNA, RNA, or PNA. In addition to adenine (A), cytosine (C), guanine (G), thymine (T), and uracil (U; for RNA molecules), synthetic probes (and polynucleotides) of the subject invention can also have inosine (a neutral base capable of pairing with all four bases; sometimes used in place of a mixture of all four bases in synthetic probes). Thus, where a synthetic, degenerate oligonucleotide is referred to herein, and “N” or “n” is used generically, “N” or “n” can be G, A, T, C, or inosine. Ambiguity codes as used herein are in accordance with standard IUPAC naming conventions as of the filing of the subject application (for example, R means A or G, Y means C or T, etc.).

[0183] As is well known in the art, if a probe molecule hybridizes with a nucleic acid sample, it can be reasonably assumed that the probe and sample have substantial homology/similarity/identity. Preferably, hybridization of the polynucleotide is first conducted followed by washes under conditions of low, moderate, or high stringency by techniques well-known in the art, as described in, for example, Keller, G. H., M. M. Manak (1987) DNA Probes, Stockton Press, New York, N.Y., pp. 169-170. For example, as stated therein, low stringency conditions can be achieved by first washing with 2×SSC (Standard Saline Citrate)/0.1% SDS (Sodium Dodecyl Sulfate) for 15 minutes at room temperature. Two washes are typically performed. Higher stringency can then be achieved by lowering the salt concentration and/or by raising the temperature. For example, the wash described above can be followed by two washings with 0.1×SSC/0.1% SDS for 15 minutes each at room temperature followed by subsequent washes with 0.1×SSC/0.1% SDS for 30 minutes each at 55° C. These temperatures can be used with other hybridization and wash protocols set forth herein and as would be known to one skilled in the art (SSPE can be used as the salt instead of SSC, for example). The 2×SSC/0.1% SDS can be prepared by adding 50 ml of 20×SSC and 5 ml of 10% SDS to 445 ml of water. 20×SSC can be prepared by combining NaCl (175.3 g/0.150 M), sodium citrate (88.2 g/0.015 M), and water, adjusting pH to 7.0 with 10 N Na0H, then adjusting the volume to 1 liter 10% SDS can be prepared by dissolving 10 g of SDS in 50 ml of autoclaved water, then diluting to 100 ml.

[0184] Detection of the probe provides a means for determining in a known manner whether hybridization has been maintained. Such a probe analysis provides a rapid method for identifying toxin-encoding genes of the subject invention. The nucleotide segments which are used as probes according to the invention can be synthesized using a DNA synthesizer and standard procedures. These nucleotide sequences can also be used as PCR primers to amplify genes of the subject invention.

[0185] Hybridization with a given wild type nucleic acids encoding Class A, Class B, and Class C TC proteins (for example, SEQ ID NOs:28-42 and 61-66) is a technique that can be used to find and/or define Class A, Class B, and Class C TC proteins, which will be useful in fusion proteins of the invention. As used herein, “stringent” conditions for hybridization refers to conditions which achieve the same, or about the same, degree of specificity of hybridization as the conditions employed by the current applicants. Specifically, hybridization of immobilized DNA on Southern blots with ³²P-labeled gene-specific probes was performed by standard methods (see, e.g., Maniatis, T., E. F. Fritsch, J. Sambrook [1982] Molecular Cloning: A Laboratory Manual, Cold Spring Harbor Laboratory, Cold Spring Harbor, N.Y.). In general, hybridization and subsequent washes were carried out under conditions that allowed for detection of target sequences. For double-stranded DNA gene probes, hybridization was carried out overnight at 20-25° C. below the melting temperature (Tm) of the DNA hybrid in 6×SSPE, 5× Denhardt's solution, 0.1% SDS, 0.1 mg/ml denatured DNA. The melting temperature is described by the following formula (Beltz, G. A., K. A. Jacobs, T. H. Eickbush, P. T. Cherbas, and F. C. Kafatos [1983] Methods of Enzymology, R. Wu, L. Grossman and K. Moldave [eds.] Academic Press, New York 100:266-285):
[0186] 1) Tm=81.50° C.+16.6 Log[Na+]+0.41(%G+C)−0.61(% formamide)−600/length of duplex in base pairs.
[0187] 2) Washes are typically carried out as follows:
[0188] 3) Twice at room temperature for 15 minutes in 1×SSPE, 0.1% SDS (low stringency wash).
[0189] 4) Once at Tm-20° C. for 15 minutes in 0.2×SSPE, 0.1% SDS (moderate stringency wash).

[0190] For oligonucleotide probes, hybridization was carried out overnight at 10-20° C. below the melting temperature (Tm) of the hybrid in 6×SSPE, 5× Denhardt's solution, 0.1% SDS, 0.1 mg/ml denatured DNA. Tm for oligonucleotide probes was determined by the following formula: Tm (° C.)=2(number T/A base pairs)+4(number G/C base pairs) (Suggs, S. V., T.

[0191] Miyake, E. H. Kawashime, M. J. Johnson, K. Itakura, and R. B. Wallace [1981] ICN-UCLA Symp. Dev. Biol. Using Purified Genes, D. D. Brown [ed.], Academic Press, New York, 23:683-693).

[0192] Washes were typically carried out as follows:
[0193] 1) Twice at room temperature for 15 minutes 1×SSPE, 0.1% SDS (low stringency wash).
[0194] 2) Once at the hybridization temperature for 15 minutes in 1×SSPE, 0.1% SDS (moderate stringency wash).

[0195] In general, salt and/or temperature can be altered to change stringency. With a labeled DNA fragment >70 or so bases in length, the following conditions can be used:
[0196] 1) Low: 1 or 2×SSPE, room temperature
[0197] 2) Low: 1 or 2×SSPE, 42° C.
[0198] 3) Moderate: 0.2× or 1×SSPE, 65° C.
[0199] 4) High: 0.1×SSPE, 65° C.

[0200] Duplex formation and stability depend on substantial complementarity between the two strands of a hybrid, and, as noted above, a certain degree of mismatch can be tolerated. Therefore, the probe sequences of the subject invention include mutations (both single and multiple), deletions, insertions of the described sequences, and combinations thereof, wherein said mutations, insertions and deletions permit formation of stable hybrids with the target polynucleotide of interest. Mutations, insertions, and deletions can be produced in a given polynucleotide sequence in many ways, and these methods are known to an ordinarily skilled artisan. Other methods may become known in the future.

[0201] PCR Technology.

[0202] Polymerase Chain Reaction (PCR) is a repetitive, enzymatic, primed synthesis of a nucleic acid sequence. This procedure is well known and commonly used by those skilled in this art (see Mullis, U.S. Pat. Nos. 4,683,195, 4,683,202, and 4,800,159; Saiki, Randall K., Stephen Scharf, Fred Faloona, Kary B. Mullis, Glenn T. Horn, Henry A. Erlich, Norman Arnheim [1985] “Enzymatic Amplification of β-Globin Genomic Sequences and Restriction Site Analysis for Diagnosis of Sickle Cell Anemia,” Science 230:1350-1354). PCR is based on the enzymatic amplification of a DNA fragment of interest that is flanked by two oligonucleotide primers that hybridize to opposite strands of the target sequence. The primers are oriented with the 3′ ends pointing towards each other. Repeated cycles of heat denaturation of the template, annealing of the primers to their complementary sequences, and extension of the annealed primers with a DNA polymerase result in the amplification of the segment defined by the 5′ ends of the PCR primers. The extension product of each primer can serve as a template for the other primer, so each cycle essentially doubles the amount of DNA fragment produced in the previous cycle. This results in the exponential accumulation of the specific target fragment, up to several million-fold in a few hours. By using a thermostable DNA polymerase such as Taq polymerase, isolated from the thermophilic bacterium Thermus aquaticus, the amplification process can be completely automated. Other enzymes that can be used are known to those skilled in the art.

[0203] The DNA sequences of the subject invention can be used as primers for PCR amplification. In performing PCR amplification, a certain degree of mismatch can be tolerated between primer and template. Therefore, mutations, deletions, and insertions (especially additions of nucleotides to the 5′ end) of the exemplified primers fall within the scope of the subject invention. Mutations, insertions, and deletions can be produced in a given primer by methods known to an ordinarily skilled artisan.

[0204] Modification of Genes and Proteins.

[0205] The genes and proteins useful according to the subject invention include not only the specifically exemplified full-length sequences, but also portions, segments and/or fragments (including internal and/or terminal deletions compared to the full-length molecules) of these sequences, variants, mutants, chimerics, and fusions thereof. Proteins used in the subject invention can have substituted amino acids so long as they retain the characteristic pesticidal/functional activity of the proteins specifically exemplified herein. “Variant” genes have nucleotide sequences that encode the same proteins or equivalent proteins having functionality equivalent to an exemplified protein. The terms “variant proteins” and “equivalent proteins” refer to proteins having the same or essentially the same biological/functional activity as the exemplified proteins. As used herein, reference to an “equivalent” sequence refers to sequences having amino acid substitutions, deletions, additions, or insertions that improve or do not adversely affect functionality. Fragments retaining functionality are also included in this definition. Fragments and other equivalents that retain the same or similar function, as a corresponding fragment of an exemplified protein are within the scope of the subject invention. Changes, such as amino acid substitutions or additions, can be made for a variety of purposes, such as increasing (or decreasing) protease stability of the protein (without materially/substantially decreasing the functionality of the protein).

[0206] Variations of genes may be readily constructed using standard techniques for making point mutations, for example. In addition, U.S. Pat. No. 5,605,793, for example, describes methods for generating additional molecular diversity by using DNA reassembly after random fragmentation. Variant genes can be used to produce variant proteins; recombinant hosts can be used to produce the variant proteins. Using these “gene shuffling” techniques, equivalent genes and proteins can be constructed that comprise any 5, 10, or 20 contiguous residues (amino acid or nucleotide) of any sequence exemplified herein.

[0207] Fragments of full-length genes can be made using commercially available exonucleases or endonucleases according to standard procedures. For example, enzymes such as Bal31 or site-directed mutagenesis can be used to systematically cut off nucleotides from the ends of these genes. Also, genes that encode active fragments may be obtained using a variety of restriction enzymes. Proteases may be used to directly obtain active fragments of these proteins.

[0208] It is within the scope of the invention as disclosed herein that TC proteins may be truncated and still retain functional activity. By “truncated protein” is meant that a portion of a protein may be cleaved and yet still exhibit activity after cleavage. Cleavage can be achieved by proteases inside or outside of the insect gut. Furthermore, effectively cleaved proteins can be produced using molecular biology techniques wherein the DNA bases encoding said protein are removed either through digestion with restriction endonucleases or other techniques available to the skilled artisan. After truncation, said proteins can be expressed in heterologous systems such as E. coli, baculoviruses, plant-based viral systems, yeast and the like and then placed in insect assays as disclosed herein to determine activity. It is well-known in the art that truncated proteins can be successfully produced so that they retain functional activity while having less than the entire, full-length sequence. It is well known in the art that B.t. toxins can be used in a truncated (core toxin) form. See, e.g., Adang et al., Gene 36:289-300 (1985), “Characterized full-length and truncated plasmid clones of the crystal protein of Bacillus thuringiensis subsp kurstaki HD-73 and their toxicity to Manduca sexta.” There are other examples of truncated proteins that retain insecticidal activity, including the insect juvenile hormone esterase (U.S. Pat. No. 5,674,485 to the Regents of the University of California). As used herein, the term “toxin” is also meant to include functionally active truncations.

[0209] Because of the degeneracy/redundancy of the genetic code, a variety of different DNA sequences can encode the amino acid sequences disclosed herein. It is well within the skill of a person trained in the art to create alternative DNA sequences that encode the same, or essentially the same, toxins. These variant DNA sequences are within the scope of the subject invention.

[0210] Optimization of Sequence for Expression in Plants.

[0211] To obtain high expression of heterologous genes in plants it may be preferred to reengineer said genes so that they are more efficiently expressed in (the cytoplasm of) plant cells. Maize is one such plant where it may be preferred to re-design the heterologous gene(s) prior to transformation to increase the expression level thereof in said plant. Therefore, an additional step in the design of genes encoding a bacterial toxin is reengineering of a heterologous gene for optimal expression. Guidance regarding the production of synthetic genes that are optimized for plant expression can be found in, for example, U.S. Pat. No. 5,380,831. SEQ ID NOs:43 and 44 give examples of plant-optimized sequences encoding Class B TC protein TcdB2 and Class C TC protein TccC3.

[0212] Function, Activity, and Utility.

[0213] The present invention provides easily administered, functional proteins. The present invention also provides a method for delivering insecticidal proteins that are functionally active and effective against many orders of insects, preferably lepidopteran and/or coleopteran insects. By “functional activity” (or “active against”) it is meant herein that the proteins function as orally active insect control agents (alone or in combination with other proteins), that the proteins have a toxic effect (alone or in combination with other proteins), or are able to disrupt or deter insect growth and/or feeding which may or may not cause death of the insect. When an insect comes into contact with an “effective amount” of a “insecticidal protein” of the subject invention delivered via transgenic plant expression, formulated protein composition(s), sprayable protein composition(s), a bait matrix or other delivery system, the results are typically death of the insect, inhibition of the growth and/or proliferation of the insect, and/or prevention of the insects from feeding upon the source (preferably a transgenic plant) that makes the proteins available to the insects. Thus, insects that ingest an effective amount of ABC fusion protein, for example, can be deterred from feeding, have their growth stunted, and/or be killed, for example. A “BC” fusion protein of the invention has “functionality” or toxin activity if it enhances the functional activity of a Class A TC protein when used in combination therewith.

[0214] Complete lethality to feeding insects is preferred, but is not required to achieve functional activity. If an insect avoids the protein or ceases feeding, that avoidance will be useful in some applications, even if the effects are sublethal or lethality is delayed or indirect. For example, if insect resistant transgenic plants are desired, the reluctance of insects to feed on the plants is as useful as lethal toxicity to the insects because the ultimate objective is avoiding insect-induced plant damage.

[0215] Transfer of the functional activity to plant or bacterial systems typically requires nucleic acid sequences, encoding the amino acid sequences for the toxins, integrated into a protein expression vector appropriate to the host in which the vector will reside. One way to obtain a nucleic acid sequence encoding a protein with functional activity is to isolate the native genetic material from the bacterial species which produce the toxins, using information deduced from the toxin's amino acid sequence, as disclosed herein. The native sequences can be optimized for expression in plants, for example, as discussed in more detail below. Optimized polynucleotide can also be designed based on the protein sequence.

[0216] There are many other ways in which TC proteins can be incorporated into an insect's diet. For example, it is possible to adulterate the larval food source with the toxic protein by spraying the food with a protein solution, as disclosed herein. Alternatively, the purified protein could be genetically engineered into an otherwise harmless bacterium, which could then be grown in culture, and either applied to the food source or allowed to reside in the soil in an area in which insect eradication was desirable. Also, the protein could be genetically engineered directly into an insect food source. For instance, the major food source for many insect larvae is plant material. Therefore the genes encoding toxins can be transferred to plant material so that said plant material expresses the toxin of interest.

[0217] Transgenic Hosts.

[0218] The genes encoding Toxin Complex fusions of the subject invention can be introduced into a wide variety of microbial or plant hosts. In preferred embodiments, transgenic plant cells and plants are used. Preferred plants (and plant cells) are corn (maize), cotton, canola, sunflowers, and soybeans.

[0219] In preferred embodiments, expression of the fusion gene results, directly or indirectly, in the intracellular production (and maintenance) of the fusion protein. Plants can be rendered insect-resistant in this manner. When transgenic/recombinant/transformed/transfected host cells (or contents thereof) are ingested by the pests, the pests will ingest the toxin. This is the preferred manner in which to cause contact of the pest with the toxin. The result is control (killing or making sick) of the pest. Sucking pests can also be controlled in a similar manner. Alternatively, suitable microbial hosts, e.g., Pseudomonas such as P. fluorescens, can be applied where target pests are present; the microbes can proliferate there, and are ingested by the target pests. The microbe hosting the toxin gene can be treated under conditions that prolong the activity of the toxin and stabilize the cell. The treated cell, which retains the toxic activity, can then be applied to the environment of the target pest. The subject invention also includes the administration of cells producing less than all three types of TC polypeptides. In some embodiments, this could include the co-administration of cells producing Toxin A and cells producing a BC fusion protein of the subject invention, for example.

[0220] Where the toxin gene is introduced via a suitable vector into a microbial host, and said host is applied to the environment in a living state, certain host microbes should be used. Microorganism hosts are selected which are known to occupy the “phytosphere” (phylloplane, phyllosphere, rhizosphere, and/or rhizoplane) of one or more crops of interest. These microorganisms are selected so as to be capable of successfully competing in the particular environment (crop and other insect habitats) with the wild-type microorganisms, provide for stable maintenance and expression of the gene expressing the polypeptide pesticide, and, desirably, provide for improved protection of the pesticide from environmental degradation and inactivation.

[0221] A large number of microorganisms are known to inhabit the phylloplane (the surface of the plant leaves) and/or the rhizosphere (the soil surrounding plant roots) of a wide variety of important crops. These microorganisms include bacteria, algae, and fungi. Of particular interest are microorganisms, such as bacteria, e.g., genera Pseudomonas, Erwinia, Serratia, Klebsiella, Xanthomonas, Streptomyces, Rhizobium, Rhodopseudomonas, Methylophilius, Agrobacterium, Acetobacter, Lactobacillus, Arthrobacter, Azotobacter, Leuconostoc, and Alcaligenes; fungi, particularly yeast, e.g., genera Saccharomyces, Cryptococcus, Kluyveromyces, Sporobolomyces, Rhodotorula, and Aureobasidium. Of particular interest are such phytosphere bacterial species as Pseudomonas syringae, Pseudomonas fluorescens, Serratia marcescens, Acetobacter xylinum, Agrobacterium tumefaciens, Rhodopseudomonas spheroides, Xanthomonas campestris, Rhizobium melioti, Alcaligenes entrophus, and Azotobacter vinlandii; and phytosphere yeast species such as Rhodotorula rubra, R. glutinis, R. marina, R. aurantiaca, Cryptococcus albidus, C. diffluens, C. laurentii, Saccharomyces rosei, S. pretoriensis, S. cerevisiae, Sporobolomyces roseus, S. odorus, Kluyveromyces veronae, and Aureobasidium pollulans. Also of interest are pigmented microorganisms.

[0222] Insertion of Genes to Form Transgenic Hosts.

[0223] One aspect of the subject invention is the transformation/transfection of plants, plant cells, and other host cells with polynucleotides of the subject invention that express proteins of the subject invention. Plants transformed in this manner can be rendered resistant to attack by the target pest(s).

[0224] A wide variety of methods are available for introducing a gene encoding a protein into the target host under conditions that allow for stable maintenance and expression of the gene. These methods are well known to those skilled in the art and are described, for example, in U.S. Pat. No. 5,135,867.

[0225] For example, a large number of cloning vectors comprising a replication system in E. coli and a marker that permits selection of the transformed cells are available for preparation for the insertion of foreign genes into higher plants. The vectors comprise, for example, pBR322, pUC series, M13mp series, pACYC184, etc. Accordingly, the sequence encoding the toxin can be inserted into the vector at a suitable restriction site. The resulting plasmid is used for transformation into E. coli. The E. coli cells are cultivated in a suitable nutrient medium, then harvested and lysed. The plasmid is recovered. Sequence analysis, restriction analysis, electrophoresis, and other biochemical-molecular biological methods are generally carried out as methods of analysis. After each manipulation, the DNA sequence used can be cleaved and joined to the next DNA sequence. Each plasmid sequence can be cloned in the same or other plasmids. Depending on the method of inserting desired genes into the plant, other DNA sequences may be necessary. If, for example, the Ti or Ri plasmid is used for the transformation of the plant cell, then at least the right border, but often the right and the left border of the Ti or Ri plasmid T-DNA, has to be joined as the flanking region of the genes to be inserted. The use of T-DNA for the transformation of plant cells has been intensively researched and described in EP 120 516; Hoekema (1985) In: The Binary Plant Vector System, Offset-durkkerij Kanters B. V., Alblasserdam, Chapter 5; Fraley et al., Crit. Rev. Plant Sci. 4:1-46; and An et al. (1985) EMBO J. 4:277-287.

[0226] A large number of techniques are available for inserting DNA into a plant host cell. Those techniques include transformation with T-DNA using Agrobacterium tumefaciens or Agrobacterium rhizogenes as transformation agent, fusion, injection, biolistics (microparticle bombardment), or electroporation as well as other possible methods. If Agrobacterium are used for the transformation, the DNA to be inserted has to be cloned into special plasmids, namely either into an intermediate vector or into a binary vector. The intermediate vectors can be integrated into the Ti or Ri plasmid by homologous recombination owing to sequences that are homologous to sequences in the T-DNA. The Ti or Ri plasmid also comprises the vir region necessary for the transfer of the T-DNA. Intermediate vectors cannot replicate themselves in Agrobacterium. The intermediate vector can be transferred into Agrobacterium tumefaciens by means of a helper plasmid (conjugation). Binary vectors can replicate themselves both in E. coli and in Agrobacterium. They comprise a selection marker gene and a linker or polylinker which are framed by the right and left T-DNA border regions. They can be transformed directly into Agrobacterium (Holsters et al [1978] Mol. Gen. Genet. 163:181-187). The Agrobacterium used as host cell is to comprise a plasmid carrying a vir region. The vir region is necessary for the transfer of the T-DNA into the plant cell. Additional T-DNA may be contained. The bacterium so transformed is used for the transformation of plant cells. Plant explants can advantageously be cultivated with Agrobacterium tumefaciens or Agrobacterium rhizogenes for the transfer of the DNA into the plant cell. Whole plants can then be regenerated from the infected plant material (for example, pieces of leaf, segments of stalk, roots, but also protoplasts or suspension-cultivated cells) in a suitable medium, which may contain antibiotics or biocides for selection. The plants so obtained can then be tested for the presence of the inserted DNA. No special demands are made of the plasmids in the case of injection and electroporation. It is possible to use ordinary plasmids, such as, for example, pUC derivatives.

[0227] The transformed cells grow inside the plants in the usual manner. They can form germ cells and transmit the transformed trait(s) to progeny plants. Such plants can be grown in the normal manner and crossed with plants that have the same transformed hereditary factors or other hereditary factors. The resulting hybrid individuals have the corresponding phenotypic properties.

[0228] In some preferred embodiments of the invention, genes encoding the bacterial toxin are expressed from transcriptional units inserted into the plant genome. Preferably, said transcriptional units are recombinant vectors capable of stable integration into the plant genome and enable selection of transformed plant lines expressing mRNA encoding the proteins.

[0229] Once the inserted DNA has been integrated in the genome, it is relatively stable there (and does not come out again). It normally contains a selection marker that confers on the transformed plant cells resistance to a biocide or an antibiotic, such as kanamycin, G418, bleomycin, hygromycin, or chloramphenicol, inter alia. The individually employed marker should accordingly permit the selection of transformed cells rather than cells that do not contain the inserted DNA. The gene(s) of interest are preferably expressed either by constitutive or inducible promoters in the plant cell. Once expressed, the mRNA is translated into proteins, thereby incorporating amino acids of interest into protein. The genes encoding a toxin expressed in the plant cells can be under the control of a constitutive promoter, a tissue-specific promoter, or an inducible promoter.

[0230] Several techniques exist for introducing foreign recombinant vectors into plant cells, and for obtaining plants that stably maintain and express the introduced gene. Such techniques include the introduction of genetic material coated onto microparticles directly into cells (U.S. Pat. No. 4,945,050 to Cornell and U.S. Pat. No. 5,141,131 to DowElanco, now Dow AgroSciences, LLC). In addition, plants may be transformed using Agrobacterium technology, see U.S. Pat. No. 5,177,010 to University of Toledo; U.S. Pat. No. 5,104,310 to Texas A&M; European Patent Application 0131624B1; European Patent Applications 120516, 159418B1 and 176,112 to Schilperoot; U.S. Pat. Nos. 5,149,645, 5,469,976, 5,464,763 and 4,940,838 and 4,693,976 to Schilperoot; European Patent Applications 116718, 290799, 320500 all to Max Planck; European Patent Applications 604662 and 627752, and U.S. Pat. No. 5,591,616, to Japan Tobacco; European Patent Applications 0267159 and 0292435, and U.S. Pat. No. 5,231,019, all to Ciba Geigy, now Novartis; U.S. Pat. Nos. 5,463,174 and 4,762,785, both to Calgene; and U.S. Pat. Nos. 5,004,863 and 5,159,135, both to Agracetus. Other transformation technology includes whiskers technology. See U.S. Pat. Nos. 5,302,523 and 5,464,765, both to Zeneca. Electroporation technology has also been used to transform plants. See WO 87/06614 to Boyce Thompson Institute; U.S. Pat. Nos. 5,472,869 and 5,384,253, both to Dekalb; and WO 92/09696 and WO 93/21335, both to Plant Genetic Systems. Furthermore, viral vectors can also be used to produce transgenic plants expressing the protein of interest. For example, monocotyledonous plant can be transformed with a viral vector using the methods described in U.S. Pat. No. 5,569,597 to Mycogen Plant Science and Ciba-Giegy, now Novartis, as well as U.S. Pat. Nos. 5,589,367 and 5,316,931, both to Biosource.

[0231] As mentioned previously, the manner in which the DNA construct is introduced into the plant host is not critical to this invention. Any method that provides for efficient transformation can be employed. For example, various methods for plant cell transformation are described herein and include the use of Ti or Ri-plasmids and the like to perform Agrobacterium mediated transformation. In many instances, it will be desirable to have the construct used for transformation bordered on one or both sides by T-DNA borders, more specifically the right border. This is particularly useful when the construct uses Agrobacterium tumefaciens or Agrobacterium rhizogenes as a mode for transformation, although T-DNA borders may find use with other modes of transformation. Where Agrobacterium is used for plant cell transformation, a vector may be used which may be introduced into the host for homologous recombination with T-DNA or the Ti or Ri plasmid present in the host. Introduction of the vector may be performed via electroporation, tri-parental mating and other techniques for transforming gram-negative bacteria which are known to those skilled in the art. The manner of vector transformation into the Agrobacterium host is not critical to this invention. The Ti or Ri plasmid containing the T-DNA for recombination may be capable or incapable of causing gall formation, and is not critical to said invention so long as the vir genes are present in said host.

[0232] In some cases where Agrobacterium is used for transformation, the expression construct being within the T-DNA borders will be inserted into a broad spectrum vector such as pRK2 or derivatives thereof as described in Ditta et al., (PNAS USA (1980) 77:7347-7351 and EPO 0 120 515, which are incorporated herein by reference. Included within the expression construct and the T-DNA will be one or more markers as described herein which allow for selection of transformed Agrobacterium and transformed plant cells. The particular marker employed is not essential to this invention, with the preferred marker depending on the host and construction used.

[0233] For transformation of plant cells using Agrobacterium, explants may be combined and incubated with the transformed Agrobacterium for sufficient time to allow transformation thereof. After transformation, the Agrobacterium are killed by selection with the appropriate antibiotic and plant cells are cultured with the appropriate selective medium. Once calli are formed, shoot formation can be encouraged by employing the appropriate plant hormones according to methods well known in the art of plant tissue culturing and plant regeneration. However, a callus intermediate stage is not always necessary. After shoot formation, said plant cells can be transferred to medium which encourages root formation thereby completing plant regeneration. The plants may then be grown to seed and said seed can be used to establish future generations. Regardless of transformation technique, the gene encoding a bacterial toxin is preferably incorporated into a gene transfer vector adapted to express said gene in a plant cell by including in the vector a plant promoter regulatory element, as well as 3′ non-translated transcriptional termination regions such as Nos and the like.

[0234] In addition to numerous technologies for transforming plants, the type of tissue that is contacted with the foreign genes may vary as well. Such tissue would include but would not be limited to embryogenic tissue, callus tissue types I, II, and III, hypocotyl, meristem, root tissue, tissues for expression in phloem, and the like. Almost all plant tissues may be transformed during dedifferentiation using appropriate techniques described herein.

[0235] As mentioned above, a variety of selectable markers can be used, if desired. Preference for a particular marker is at the discretion of the artisan, but any of the following selectable markers may be used along with any other gene not listed herein which could function as a selectable marker. Such selectable markers include but are not limited to aminoglycoside phosphotransferase gene of transposon Tn5 (Aph II) which encodes resistance to the antibiotics kanamycin, neomycin and G418, as well as those genes which encode for resistance or tolerance to glyphosate; hygromycin; methotrexate; phosphinothricin (bialaphos); imidazolinones, sulfonylureas and triazolopyrimidine herbicides, such as chlorsulfuron; bromoxynil, dalapon and the like.

[0236] In addition to a selectable marker, it may be desirous to use a reporter gene. In some instances a reporter gene may be used with or without a selectable marker. Reporter genes are genes which are typically not present in the recipient organism or tissue and typically encode for proteins resulting in some phenotypic change or enzymatic property. Examples of such genes are provided in K. Wising et al. Ann. Rev. Genetics, 22, 421 (1988). Preferred reporter genes include the beta-glucuronidase (GUS) of the uidA locus of E. coli, the chloramphenicol acetyl transferase gene from Tn9 of E. coli, the green fluorescent protein from the bioluminescent jellyfish Aequorea victoria, and the luciferase genes from firefly Photinus pyralis. An assay for detecting reporter gene expression may then be performed at a suitable time after said gene has been introduced into recipient cells. A preferred such assay entails the use of the gene encoding beta-glucuronidase (GUS) of the uidA locus of E. coli as described by Jefferson et al., (1987 Biochem. Soc. Trans. 15, 17-19) to identify transformed cells.

[0237] In addition to plant promoter regulatory elements, promoter regulatory elements from a variety of sources can be used efficiently in plant cells to express foreign genes. For example, promoter regulatory elements of bacterial origin, such as the octopine synthase promoter, the nopaline synthase promoter, the mannopine synthase promoter; promoters of viral origin, such as the cauliflower mosaic virus (35S and 19S), 35T (which is a re-engineered 35S promoter, see U.S. Pat. No. 6,166,302, especially Example 7E) and the like may be used. Plant promoter regulatory elements include but are not limited to ribulose-1,6-bisphosphate (RUBP) carboxylase small subunit (ssu), beta-conglycinin promoter, beta-phaseolin promoter, ADH promoter, heat-shock promoters, and tissue specific promoters. Other elements such as matrix attachment regions, scaffold attachment regions, introns, enhancers, polyadenylation sequences and the like may be present and thus may improve the transcription efficiency or DNA integration. Such elements may or may not be necessary for DNA function, although they can provide better expression or functioning of the DNA by affecting transcription, mRNA stability, and the like. Such elements may be included in the DNA as desired to obtain optimal performance of the transformed DNA in the plant. Typical elements include but are not limited to Adh-intron 1, Adh-intron 6, the alfalfa mosaic virus coat protein leader sequence, the maize streak virus coat protein leader sequence, as well as others available to a skilled artisan. Constitutive promoter regulatory elements may also be used thereby directing continuous gene expression in all cells types and at all times (e.g., actin, ubiquitin, CaMV 35S, and the like). Tissue specific promoter regulatory elements are responsible for gene expression in specific cell or tissue types, such as the leaves or seeds (e.g., zein, oleosin, napin, ACP, globulin and the like) and these may also be used.

[0238] Promoter regulatory elements may also be active during a certain stage of the plant's development as well as active in plant tissues and organs. Examples of such include but are not limited to pollen-specific, embryo-specific, corn-silk-specific, cotton-fiber-specific, root-specific, seed-endosperm-specific promoter regulatory elements and the like. Under certain circumstances it may be desirable to use an inducible promoter regulatory element, which is responsible for expression of genes in response to a specific signal, such as: physical stimulus (heat shock genes), light (RUBP carboxylase), hormone (Em), metabolites, chemical, and stress. Other desirable transcription and translation elements that function in plants may be used. Numerous plant-specific gene transfer vectors are known in the art.

[0239] Standard molecular biology techniques may be used to clone and sequence the toxins described herein. Additional information may be found in Sambrook, J., Fritsch, E. F., and Maniatis, T. (1989), Molecular Cloning, A Laboratory Manual, Cold Spring Harbor Press, which is incorporated herein by reference.

[0240] Resistance Management.

[0241] With increasing commercial use of insecticidal proteins in transgenic plants, one consideration is resistance management. That is, there are numerous companies using Bacillus thuringiensis toxins in their products, and there is concern about insects developing resistance to B.t. toxins. One strategy for insect resistance management would be to combine the TC insecticidal proteins produced by Xenorhabdus, Photorhabdus, and the like with toxins such as B.t. crystal toxins, soluble insecticidal proteins from Bacillus stains (see, e.g., WO 98/18932 and WO 99/57282), or other insect toxins. The combinations could be formulated for a sprayable application or could be molecular combinations. Plants could be transformed with bacterial genes that produce two or more different insect toxins (see, e.g., Gould, 38 Bioscience 26-33 (1988) and U.S. Pat. No. 5,500,365; likewise, European Patent Application 0 400 246 A1 and U.S. Pat. Nos. 5,866,784; 5,908,970; and 6,172,281 also describe transformation of a plant with two B.t. crystal toxins). Another method of producing a transgenic plant that contains more than one insect resistant gene would be to first produce two plants, with each plant containing an insect resistance gene. These plants could then be crossed using traditional plant breeding techniques to produce a plant containing more than one insect resistance gene. Thus, it should be apparent that the phrase “comprising a polynucleotide” as used herein means at least one polynucleotide (and possibly more, contiguous or not) unless specifically indicated otherwise.

[0242] Formulations and Other Delivery Systems.

[0243] Formulated bait granules containing cells and/or proteins of the subject invention (including recombinant microbes comprising the genes described herein) can be applied to the soil. Formulated product can also be applied as a seed-coating or root treatment or total plant treatment at later stages of the crop cycle. Plant and soil treatments of cells may be employed as wettable powders, granules or dusts, by mixing with various inert materials, such as inorganic minerals (phyllosilicates, carbonates, sulfates, phosphates, and the like) or botanical materials (powdered corncobs, rice hulls, walnut shells, and the like). The formulations may include spreader-sticker adjuvants, stabilizing agents, other pesticidal additives, or surfactants. Liquid formulations may be aqueous-based or non-aqueous and employed as foams, gels, suspensions, emulsifiable concentrates, or the like. The ingredients may include rheological agents, surfactants, emulsifiers, dispersants, or polymers.

[0244] As would be appreciated by a person skilled in the art, the pesticidal concentration will vary widely depending upon the nature of the particular formulation, particularly whether it is a concentrate or to be used directly. The pesticide will be present in at least 1% by weight and may be 100% by weight. The dry formulations will have from about 1-95% by weight of the pesticide while the liquid formulations will generally be from about 1-60% by weight of the solids in the liquid phase. The formulations will generally have from about 10² to about 10⁴ cells/mg. These formulations will be administered at about 50 mg (liquid or dry) to 1 kg or more per hectare.

[0245] The formulations can be applied to the environment of the pest, e.g., soil and foliage, by spraying, dusting, sprinkling, or the like.

[0246] Another delivery scheme is the incorporation of the genetic material of toxins into a baculovirus vector. Baculoviruses infect particular insect hosts, including those desirably targeted with the toxins. Infectious baculovirus harboring an expression construct for the toxins could be introduced into areas of insect infestation to thereby intoxicate or poison infected insects.

[0247] Insect viruses, or baculoviruses, are known to infect and adversely affect certain insects. The effect of the viruses on insects is slow, and viruses do not immediately stop the feeding of insects. Thus, viruses are not viewed as being optimal as insect pest control agents. However, combining the toxin genes into a baculovirus vector could provide an efficient way of transmitting the toxins. In addition, since different baculoviruses are specific to different insects, it may be possible to use a particular toxin to selectively target particularly damaging insect pests. A particularly useful vector for the toxins genes is the nuclear polyhedrosis virus. Transfer vectors using this virus have been described and are now the vectors of choice for transferring foreign genes into insects. The virus-toxin gene recombinant may be constructed in an orally transmissible form. Baculoviruses normally infect insect victims through the mid-gut intestinal mucosa. The toxin gene inserted behind a strong viral coat protein promoter would be expressed and should rapidly kill the infected insect.

[0248] In addition to an insect virus or baculovirus or transgenic plant delivery system for the protein toxins of the present invention, the proteins may be encapsulated using Bacillus thuringiensis encapsulation technology such as but not limited to U.S. Pat. Nos. 4,695,455;

[0249] 4,695,462; 4,861,595 which are all incorporated herein by reference. Another delivery system for the protein toxins of the present invention is formulation of the protein into a bait matrix, which could then be used in above and below ground insect bait stations. Examples of such technology include but are not limited to PCT Patent Application WO 93/23998, which is incorporated herein by reference.

[0250] Plant RNA viral based systems can also be used to express bacterial toxin. In so doing, the gene encoding a toxin can be inserted into the coat promoter region of a suitable plant virus which will infect the host plant of interest. The toxin can then be expressed thus providing protection of the plant from insect damage. Plant RNA viral based systems are described in U.S. Pat. Nos. 5,500,360 to Mycogen Plant Sciences, Inc. and U.S. Pat. Nos. 5,316,931 and 5,589,367 to Biosource Genetics Corp.

[0251] In addition to producing a transformed plant, there are other delivery systems where it may be desirable to engineer the bacterial gene(s). For example, a protein toxin can be constructed by fusing together a molecule attractive to insects as a food source with a toxin. After purification in the laboratory such a toxic agent with “built-in” bait could be packaged inside standard insect trap housings.

[0252] Mutants.

[0253] Mutants of bacterial isolates can be made by procedures that are well known in the art. For example, asporogenous mutants can be obtained through ethylmethane sulfonate (EMS) mutagenesis of an isolate. The mutants can be made using ultraviolet light and nitrosoguanidine by procedures well known in the art.

[0254] All patents, patent applications, provisional applications, and publications referred to or cited herein are incorporated by reference in their entirety to the extent they are not inconsistent with the explicit teachings of this specification.

[0255] Following are examples that illustrate procedures for practicing the invention. These examples should not be construed as limiting. All percentages are by weight and all solvent mixture proportions are by volume unless otherwise noted.

### EXAMPLE 1

### Construction of the Gene tcdB2/tccC3 V1

[0256] The coding regions for Toxin Complex potentiator or synergy factor genes tcdB2 and tccC3 from Photorhabdus luminescens strain W-14 were joined through a specific synthetic oligonucleotide segment. In a multi-step process, using standard molecular biology techniques, the 3′ end of the coding region of the tcdB2 gene was modified to eliminate the native translation termination codon, and enable the joining of the tcdB2 coding region to other coding regions. Likewise the 5′ end of the coding region of the tccC3 gene was engineered to allow joining to other coding regions. The two amended coding regions were then joined as a single open reading frame, in a pET expression plasmid vector (Novagen, Madison Wis.) in such a way as to maintain appropriate bacterial transcription and translation signals. The plasmid was designated pDAB8920. The DNA sequence of the resulting fused coding region cassette is shown in SEQ ID NO:1. The coding regions of TcdB2, the linker peptide and TccC3 are represented by nucleotides 48-4469, 4470-4511 and 4512-7394 of SEQ ID NO:1, respectively. The polypeptide encoded by the fused gene in SEQ ID NO:1 is shown in SEQ ID NO:2. The amino acid sequences of TcdB2, the linker peptide and TccC3 are represented by amino acids 1-1474, 1475-1488 and 1489-2448 of SEQ ID NO:2 respectively.

[0257] The joining oligonucleotide (SEQ ID NO:3) between the tcdB2 and tccC3 coding regions encodes a polypeptide linker fragment (SEQ ID NO:4). The linker polypeptide was specifically designed to contain several inventive features. The goal was to connect the TcdB2 and TccC3 protein domains through an unstructured, hydrophilic, flexible polypeptide linker. Such a linker is not expected to inhibit folding of the connected TcdB2 and TccC3 proteins. In addition, the linker region was constructed to be susceptible to proteolysis, thereby allowing separation of TcdB2 and TccC3 proteins.

[0258] Specifically, proline residues were engineered onto each end of the linker peptide connecting TcdB2 and TccC3 (SEQ ID NO:4). The proline residues were added with the intention of introducing bends into the polypeptide backbone, thereby exposing the residues between them. Unique restriction sites were inserted into the joining oligonucleotide sequence adjacent to the proline codons (SEQ ID NO:3). The Bam HI restriction site encodes the amino acids glycine and serine. Glycine is known to introduce flexibility within the polypeptide backbone and to inhibit secondary structures within the protein. The Stu I site encodes the proline described above and arginine. The amino acids serine and arginine are both hydrophilic residues. The unique restriction sites facilitate introduction of additional joining oligonucleotides.

[0259] The amino acid linker sequence encoded between the Bam HI and Stu I restriction sites (DNKGQTIRT of SEQ ID NO:4) was chosen from the Toxin Complex protein TcdB1. This sequence was preferred because it had four desirable features. First, seven of the nine encoded amino acids are hydrophilic residues (aspartic acid (D), asparagine (N), lysine (K), glutamine (Q), threonine (T) and arginine (R)). The hydrophilic residues ensure the segment is on the surface of the fusion protein and exposed to polar solvents. Second, two sites predicted to be cleaved by the protease trypsin are contained within the sequence (KG and RT). Third, the segment contains residues known to inhibit secondary structure of proteins (glycine and asparagine). Fourth, the sequence contains the residue glycine which is known to introduce flexibility into peptide chains.

### EXAMPLE 2

### Protein Sources for Bioassay

[0260] The Class A TC proteins TcdA and XptA2_{xwi} were utilized in a purified form prepared from cultures of Pseudomonas fluorescens heterologously expressing the respective genes. The Class B and Class C potentiators, TcdB2 and TccC3 and the new fusion protein TcdB2/TccC3 V1 were tested as components of E. coli lysates. The use of lysates was validated by comparison to purified preparations of TcdB2 and TccC3. Reading frames encoding TcdB2 and TccC3 proteins were engineered for expression in E. coli by cloning into a pET plasmid (Novagen, Madison Wis.) a dicistronic operon of the order tcdB2-tccC3. The plasmid which encoded and produced the separate (non fused) TcdB2 and TccC3 proteins was named pDAB3093. Each coding region contained an appropriately spaced ribosome binding site (relative to the start codon) and termination signal. The DNA sequences at the 5′ ends of the genes were modified to reduce predicted secondary structure of the RNA and hence increase translation. These base changes were silent and did not result in amino acid changes in the encoded protein.

### EXAMPLE 3

### Expression Conditions and Lysate Preparations

[0261] The expression plasmids pET (empty vector control), pDAB3093 and pDAB8920 were transformed into the E. coli T7 expression strain BL21(DE3) (Novagen, Madison Wis.) using standard methods. Expression cultures were initiated with 10-200 freshly transformed colonies into 250 mL LB medium containing 50 μg/ml antibiotic and 75 μM IPTG (isopropyl-β-D-thiogalatopyranoside). The cultures were grown at 28° C. for 24 hours at 180-200 rpm. The cells were collected by centrifugation in 250 ml Nalgene bottles at 3,400×g for 10 minutes at 4° C. The pellets were suspended in 4-4.5 mL Butterfield's Phosphate solution (Hardy Diagnostics, Santa Maria, Calif.; 0.3 mM potassium phosphate pH 7.2). The suspended cells were transferred to 50 mL polypropylene screw cap centrifuge tubes with 1 mL of 0.1 mm diameter glass beads (Biospec, Bartlesville, Okla., catalog number 1107901). The cell-glass bead mixture was chilled on ice, then the cells were lysed by sonication with two 45 second bursts using a 2 mm probe with a Branson Sonifier 250 (Danbury CT) at an output of ˜20, chilling completely between bursts. The lysates were transferred to 2 mL Eppendorf tubes and centrifuged 5 minutes at 16,000×g. The supernatants were collected and the protein concentration measured. Bio-Rad Protein Dye Assay Reagent was diluted 1:5 with H₂O and 1 mL was added to 10 μL of a 1:10 dilution of each sample and to bovine serum albumin (BSA) at concentrations of 5, 10, 15, 20 and 25 μg/mL. The samples were then read on a spectrophotometer measuring the optical density at the wavelength of 595 nm in the Shimadzu UV160U spectrophotometer (Kyoto, JP).

[0262] The amount of protein contained in each sample was then calculated against the BSA standard curve and adjusted to between 3-6 mg/mL with phosphate buffer. The lysates were typically assayed fresh, however no loss in activity was observed when stored at −70° C.

### EXAMPLE 4

### Bioassay Conditions

[0263] Insect bioassays were conducted with neonate larvae on artificial diets in 128-well trays specifically designed for insect bioassays (C-D International, Pitman, N.J.). The species assayed were the southern corn rootworm, Diabrotica undecimpunctata howardii (Barber), the corn earworm, Helicoverpa zea (Boddie), and the beet armyworm, Spodoptera exigua (Hübner).

[0264] Bioassays were incubated under controlled environmental conditions (28° C., ˜40% r.h., 16:8 [L:D]) for 5 days at which point the total number of insects in the treatment, the number of dead insects, and the weight of surviving insects were recorded.

[0265] The biological activity of the crude lysates alone or with added TcdA or XptA2_{xwi} toxin proteins was assayed as follows. Crude E. coli lysates (40 μL) of either control cultures or those expressing potentiator proteins were applied to the surface of artificial diet in 8 wells of a bioassay tray. The average surface area of treated diet in each well was ˜1.5 cm² The lysates were adjusted to between 3-5 mg/mL total protein and were applied with and without TcdA or XptA2_{xwi}. The TcdA or XptA2_{xwi} added were highly purified fractions from bacterial cultures heterologously expressing the proteins. The final concentrations of XptA2_{xwi} and TcdA on the diet were 250 ng/cm² and 50 ng/cm², respectively.

### EXAMPLE 5

### Bioassay Results

[0266] Table 5 shows the bioassay results for lysates of cells programmed to express the fusion protein TcdB2/TccC3 V1, as compared to control cell lysates and lysates of cells programmed to express the non fused potentiators TcdB2+TccC3. Examination of the data show that TcdA (coleopteran toxin) and XptA2_{xwi} (lepidopteran toxin) had negligible impact when mixed with control lysates. It should be noted that the amount of TcdA and XptA2_{xwi} added to the lysates was adjusted to highlight the potentiation affect of the TcdB2 and TccC3 encoding genes. Lysates from pDAB3093-containing cells alone did not kill insects. However, when mixed with TcdA or XptA2_{xwi}, significant mortality was noted with the expected spectrum. Surprisingly, lysates of cells programmed to produce the fusion protein TcdB2/TccC3 V1 exhibited a similar activity profile as the non fused potentiators. Analysis of the various lysates by SDS-PAGE showed the presence of a prominent ˜280 kDa in pDAB8920 samples. The migration of the band is consistent with the predicted molecular weight of TcdB2/TccC3 V1. The band was not detected in control or pDAB3093 samples. These results demonstrate that the plasmid pDAB8920 produces the novel fusion protein TcdB2/TccC3 V1 and this protein potentiates the activity of the insect toxins TcdA and XptA2.

TABLE 5
Response of coleopteran and lepidopteran species to E. coli lysates
and purified proteins. Seven to nine insects used per replicate.
Data are for three independent replicates.

| | Insect Species | | | |
|---|---|---|---|---|
| | | Southern | | |
| | Lysates | Corn | Corn | Beet |
| Sample | Tested | Rootworm | Earworm | Armyworm |
| pET | Control | 0 | 0 | 0 |
| pET + TcdA | Control | 0 | 0 | 0 |
| pET + XptA2 | Control | 0 | 0 | 0 |
| pDAB3093 | TcdB2 + TccC3 | 0 | 0 | 0 |
| pDAB3093 + | TcdB2 + TccC3 | ++++ | 0 | 0 |
| TcdA | | | | |
| pDAB3093 + | TcdB2 + TccC3 | 0 | ++++ | ++++ |
| XptA2 | | | | |
| pDAB8920 | TcdB2/Tcc3 V1 | 0 | 0 | 0 |
| pDAB8920 + | TcdB2/Tcc3 V1 | ++++ | + | + |
| TcdA | | | | |
| pDAB8920 + | TcdB2/TccC3 V1 | 0 | ++++ | ++++ |
| XptA2 | | | | |

Mortality Scale:
0 = 0-20%;
+ = 21-41%;
++ = 41 = 60%;
+++ = 61-80%;
++++ = 81-100%.

### EXAMPLE 6

### Binding of TcdB2+TccC3 and TcdB2/TccC3 V1 to XptA2

[0267] Purified samples of heterologously expressed TcdB2+TccC3 complex and the TcdB2/TccC3 V1 fusion protein were prepared. Binding of the TcdB2+TccC3 complex (non fused) and the TcdB2/TccC3 V1 fusion protein to XptA2 was measured by surface plasmon resonance (SPR) spectroscopy using a BiaCore 3000 instrument. Briefly, highly purified (0.05 mg/ml) XptA2 in 10 mM sodium acetate, pH 4.8 was coupled to a CM4 chip having been activated with N-hydroxysuccinimide and N-ethyl-N′-(dimethylaminopropyl) carbodiimide to achieve 2,000 resonance units (RU) of immobilization. After the immobilization, the remaining active amine groups were blocked with 1 M ethanolamine hydrochloride, pH 8.5. Binding was measured by flowing 200 μl of either 100 nM of TcdB2+TccC3 complex or 25 nM TcdB2/TccC3 V1 fusion protein in 10 mM HEPES pH 7.4, 150 mM NaCl, and 0.005% Surfactant P20 at a flow rate of 30 μl/min over the chip containing the immobilized XptA2 protein. Changes in RU were measured and the rate of change fitted to a non-linear regression curve to obtain the rate of association of TcdB2+TccC3 complex or TcdB2/TccC3 V1 fusion protein to the XptA2. Surprisingly, the association rate of the TcdB2/TccC3 V1 fusion protein (ka=1.03×10⁶) was at least 20-fold greater than the association rate of TcdB2+TccC3 complex (ka=4.49×10⁴). That is, the TcdB2/TccC3 V1 fusion protein bound XptA2 faster than the non fused TcdB2+TccC3 complex. Once bound, neither preparation dissociated readily from XptA2.

### EXAMPLE 7

### Additonal TcdB2/TccC3 Fusion Proteins

[0268] Additional fusion genes between the TcdB2 and TccC3 coding regions were constructed using standard molecular biology techniques. All constructions were made in the pET expression plasmid described in Example 1 and had appropriate bacterial transcription and translation signals. A total of six different TcdB2/TccC3 fusions were made and tested. Table 6 shows the TcdB2/Linker/TccC3 protein junction sequence for the fusion proteins. For clarity, the fusion proteins will be referred to by a numerical designation derived from the encoding plasmid. For example, fusion protein TcdB2/TccC3 V1 as described in Example 1, encoded by plasmid pDAB8920, will be known as protein 8920 (Table 6). With the exception of a single fusion protein (8563) all of the fusion proteins contain full length coding regions for TcdB2 and TccC3. Protein 8563 contains a truncated form of the TccC3 coding region where the DNA encoding the first 21 amino acids has been deleted. The linker regions between the TcdB2 and TccC3 coding regions vary in length encoding from zero to 93 amino acids. Table 6 lists the fusion protein expression plasmids, gene and protein names, coding regions, relevant protein segments and associated SEQ ID NOs. Table 7 lists the junctions including the linker segments of the fusion proteins described in Table 6. A brief description of the various fusion proteins is given below.

TABLE 6
Fusion Protein Sequence Information

| | | | Coding | | | | | | |
|---|---|---|---|---|---|---|---|---|---|
| | | | Region | | | | | | |
| | | DNA | (excluding | | Protein | TcdB2 | | TccC3 | XptA2 |
| | | SEQ | stop | Encoded | SEQ | Segment | Linker | Segment | Segment |
| | Gene | ID | codons; | Fusion | ID | (AA | Segments | (AA | (AA |
| Plasmid | Name | NO: | nucleotides) | Protein | NO: | residues) | (AA residues) | residues) | residues) |
| pDAB8563 | 8563 | 45 | 48-7295 | 8563 | 46 | 1-1474 | 1475-1477 | 1478-2416 | NA |
| pDAB8564 | 8564 | 47 | 48-7349 | 8564 | 48 | 1-1474 | None | 1475-2434 | NA |
| pDAB8940 | 8940 | 49 | 48-7364 | 8940 | 50 | 1-1474 | 1475-1479 | 1480-2439 | NA |
| pDAB8920 | 8920 | 51 | 48-7391 | 8920 | 52 | 1-1474 | 1475-1488 | 1489-2448 | NA |
| pDAB8921 | 8921 | 53 | 48-7463 | 8921 | 54 | 1-1474 | 1475-1512 | 1513-2472 | NA |
| pDAB8923 | 8923 | 55 | 48-7628 | 8923 | 56 | 1-1474 | 1475-1567 | 1568-2527 | NA |
| pDAB8951 | 8951 | 57 | 21-7436 | 8951 | 58 | 999-2472 | 961-998 | 1-960 | NA |
| pDAB8811 | 8811 | 59 | 34-15018 | 8811 | 60 | 2548-4021 | XptA2/TcdB2 | 4036-4995 | 1-2538 |
| | | | | | | | 2539-2547 | | |
| | | | | | | | TcdB2/TccC3 | | |
| | | | | | | | 4022-4035 | | |

[0269] TABLE 7
Sequence of Fusion Protein Junctions

| | | |
|---|---|---|
| | Linker | |
| | Size | Linkers (underlined) and adjacent protein sequences |
| Protein | (AA) | of various toxin complex fusion proteins. |

| | | | |
|---|---|---|---|
| 8563 | 3; 21 | TcdB2 | >DENDTAAEVKKVKM> |
| | AA | Linker | >PGS> |
| | TccC3 | TccC3 | >GLIIRNIDF> |
| | deletion | | |
| 8564 | 0 | TcdB2 | >DENDTAAEVKKVKM> |
| | | Linker | None |
| | | TccC3 | >MKNIDPKLYQKTPTVSVYDNRGLIIRNIDF> |
| 8940 | 5 | TcdB2 | >DENDTAAEVKKVKM> |
| | | Linker | >PGSRP> |
| | | TccC3 | >MKNIDPKLYQKTPTVSVYDNRGLIIRNIDF> |
| 8920 | 14 | TcdB2 | >DENDTAAEVKKVKM> |
| | | Linker | >PGSDNKGQTIRTRP> |
| | | TccC3 | >MKNIDPKLYQKTPTVSVYDNRGLIIRNIDF> |
| 8921 | 38 | TcdB2 | >DENDTAAEVKKVKM> |
| | | Linker | >PRLDRAADITTQNAHDSAIVALRQNIPTPAPLSLRSRP> |
| | | TccC3 | >MKNIDPKLYQKTPTVSVYDNRGLIIRNIDF> |
| 8923 | 93 | TcdB2 | >DENDTAAEVKKVKM> |
| | | Linker | >PGSEAYADTHVYDPIGREIKVITAKGWFRRTLFTPWFTVNEDENDTA> |
| | | Linker | >AEVKKVKMPRLDRAADITTQNAHDSAIVALRQNIPTPAPLSLRSRP> |
| | | TccC3 | >MKNIDPKLYQKTPTVSVYDNRGLIIRNIDF> |
| 8951 | 38 | TccC3 | >DAEISFLTTIPLKNVKPHKR> |
| | | Linker | >PRLDRAADITTQNAHDSAIVALRQNIPTPAPLSLRSRP> |
| | | TcdB2 | >MQNSQDFSITELSLPKGGGA> |
| 8811 | 9 | XptA2 | >KALLESLSDIILHIRYTIRS> |
| | | Linker | >PRDRTRPTS> |
| | | TcdB2 | >MQNSQDFSITELSLPKGGGA> |
| 8811 | 14 | TcdB2 | >WFTVNEDENDTAAEVKKVKM> |
| | | Linker | >PGSDNKGQTIRTRP> |
| | | TccC3 | >MKNIDPKLYQKTPTVSVYDN> |

[0270] Plasmid pDAB8563 encodes fusion protein 8563 which consists of the entire TcdB2 coding region fused through a three amino acid linker (PGS) to a truncated TccC3 coding region (TccC3 amino acids 1-21 deleted). The DNA sequence for the gene encoding protein 8563 is shown in SEQ ID NO:45. The amino acid sequence for protein 8563 is shown in SEQ ID No:46

[0271] Plasmid pDAB8564 encodes fusion protein 8564 which consists for the entire TcdB2 coding region fused directly to the entire coding region of TccC3. There are no additional amino acids which constitute a linker sequence. The DNA sequence for the gene encoding protein 8564 is shown in SEQ ID NO:47. The amino acid sequence for protein 8564 is shown in SEQ ID NO:48.

[0272] Plasmid pDAB8940 encodes fusion protein 8940 which consists for the entire TcdB2 coding region fused directly to the entire coding region of TccC3 through a five amino acid linker. The DNA sequence for the gene encoding protein 8940 is shown in SEQ ID NO:49. The amino acid sequence for protein 8940 is shown in SEQ ID NO:50.

[0273] Plasmid pDAB8920 encodes fusion protein 8920 which consists for the entire TcdB2 coding region fused directly to the entire coding region of TccC3 through a fourteen amino acid linker. A portion of the linker sequence (DNKGQTIRT) was derived from the Photorhabdus protein TcdB1 as described in Example 1. The DNA sequence for the gene encoding protein 8920 is shown in SEQ ID NO:51. The amino acid sequence for protein 8920 is shown in SEQ ID NO:52.

[0274] Plasmid pDAB8921 encodes fusion protein 8921 which consists for the entire TcdB2 coding region fused directly to the entire coding region of TccC3 through a 38 amino acid linker. Thirty six amino acids of the linker sequence (PRLDRAADITTQNAHDSAIVALRQNIPTPAPLSLRS) are derived from the Photorhabdus protein TcdA1. The DNA sequence for the gene encoding protein 8921 is shown in SEQ ID NO:53. The amino acid sequence for protein 8921 is shown in SEQ ID NO:54.

[0275] Plasmid pDAB8923 encodes fusion protein 8923 which consists for the entire TcdB2 coding region fused directly to the entire coding region of TccC3 through a 93 amino acid linker. There are three segments to the linker. The first segment, immediately following the coding region of TcdB2 is a three amino acid segment (PGS). The second segment is a duplication of the final 52 amino acids of TcdB2 (EAYADTHVYDPIGREIKVITAKGWFRRTLFTPWFTVNEDENDTAAEVKKVKM). The third segment is the 38 amino acid linker described for protein 8921 above. The DNA sequence for the gene encoding protein 8923 is shown in SEQ ID NO:55. The amino acid sequence for protein 8923 is shown in SEQ ID NO:56.

### EXAMPLE 8

### Expression and Bioassay of TcdB2/TccC3 Fusion Proteins 8563, 8564, 8940, 8920, 8921 and 8923

[0276] Expression conditions and lysate preparation were as described in Examples 3 and 4. Analysis of the fusion protein lysates by SDS-PAGE 4-20% tris-glycine (Cambrex, Walkersville Md.) showed a prominent Coomassie blue staining band within the expected molecular weight range (˜270-285 kDa), these high molecular weight bands were not present in control lysates. The lysates were bioassayed as above with a slight modification, lysates were assayed with XptA2 adjusted to either 67 or 133 ng/cm². The results from these bioassays are expressed as growth inhibition. Percent growth inhibition is calculated as follows: Growth Inhibtion (%)=100×(avg. weight of insects in treatment)/(avg. weight of insects in control).

TABLE 8
Growth of corn earworm fed E. coli lysates alone and with purified
XptA2 protein. Bioassays were repeated 2-3 times using 8
insects/treatment in each replicate.

| | | XptA2 | | |
|---|---|---|---|---|
| | | Concentration | | |
| | | (ng/cm²) | | |
| Sample | Lysate Tested | 0 | 67 | 133 |
| pET | Control | 0 | 0 | 0 |
| PDAB3093 | TcdB2 + TccC3 | 0 | ++++ | ++++ |
| PDAB8563 | 8563 | 0 | + | ++ |
| PDAB8564 | 8564 | 0 | ++++ | ++++ |
| PDAB8940 | 8940 | 0 | ++++ | ++++ |
| PDAB8920 | 8920 | 0 | ++++ | ++++ |
| PDAB8921 | 8921 | 0 | ++++ | ++++ |
| PDAB8923 | 8923 | 0 | ++++ | ++++ |

Growth Inhibition Scale:
0 = 0-20%;
+ = 21-40%;
++ = 41-60%;
+++ = 61-80%;
++++ = 81-100%.

[0277] The bioassay results shown in Table 8 show that the TcdB2/TccC3 fusion proteins have high potentiation activity when combined with XptA2. Fusion protein lysates 8764 (0 aa linker), 8940 (5 aa linker), 8920 (14 aa linker) 8921 (38 aa linker) and 8923 (93 aa linker) are qualitatively equivalent to the 3093 lysate consisting of non fused TcdB2+TccC3. The lysate of 8963 (3 aa linker 21 aa deletion of TccC3), while demonstrating substantial potentiation activity, appears to be less potent than the other lysates.

[0278] These data clearly demonstrate that Toxin Complex fusion proteins consisting of both a B class and C class potentiator may be fused to create novel fusion proteins. The fusion proteins potentiate Class A protein anti-insect activity. The fusions may consist of deletions of the full length protein or may be full length proteins fused directly or through linkers up to 93 amino acids.

### EXAMPLE 9

### Construction and testing of Fusion protein 8951 TccC3/TcdB2

[0279] Examples 1-8 describe and document the construction and testing of a variety of toxin complex fusion protein genes. The fusion proteins encoded by these genes consist of an amino to carboxy terminal order of TcdB2/TccC3, joined by a variety of linkages. In this example, the construction of another toxin complex fusion protein gene is described. This new construction encodes a fusion protein with an inverted order, that is, an amino to carboxy terminal order of TccC3/TcdB2.

[0280] The genetic construction of the TccC3/TcdB2 encoding reading frame was a multi step process. In the first step, the tccC3 gene was modified by the addition of a synthetic DNA segment at the 3′ end of the tccC3 gene. The synthetic fragment encoded the linker sequence and provided unique restriction sites to allow joining of the TcdB2 coding region in a second step. In a third step, the newly constructed fusion protein encoding gene was transferred to a pET expression plasmid as described in Example 1. The resulting expression plasmid is called pDAB8951, the gene encoding the fusion protein is called 8951 and is shown in SEQ ID NO:57. The encoded fusion protein consisting of TccC3 fused to TcdB2 through a thirty eight amino acid linker is called 8951 and is shown in SEQ ID NO:58. The TccC3, linker and TcdB2 amino acid segments are described in Table 6. The junction between TccC3, linker and TcdB2 is shown in Table 7.

### EXAMPLE 10

### Expression and Bioassay of Fusion Protein 8951

[0281] The expression, lysate preparation and bioassay of fusion protein 8951 were as described in Example 8. Also as described in Example 8, SDS-PAGE analysis showed a Coomassie blue staining band corresponding the expected molecular weight of the fusion protein. Bioassay results for two E. Coli clones expressing fusion protein 8951 are shown in Table 9.

TABLE 9
Growth of corn earworm fed E. coli lysates alone and with purified
XptA2 protein. Bioassays were repeated twice for each of the clones
tested using 8 insects/treatment in each replicate.

| | | XptA2 | | |
|---|---|---|---|---|
| | | Concentration | | |
| | | (ng/cm²) | | |
| Sample | Lysate Tested | 0 | 200 | 400 |
| pET | Control | 0 | 0 | 0 |
| pDAB8951-1 | 8951 clone 1 | 0 | ++++ | ++++ |
| pDAB8951-2 | 8951 clone 2 | 0 | ++++ | ++++ |

Growth Inhibition Scale:
0 = 0-20%;
+ = 21-40%;
++ = 41-60%;
+++ = 61-80%;
++++ = 81-100%.

### EXAMPLE 11

### Construction of the Gene Encoding the Triple Fusion Protein 8811 (XptA2/TcdB2/TccC3)

[0282] The examples which follow relate to the construction and testing of a translational fusion between three coding regions. The coding region of the Xenorhabdus protein XptA2 (a Class A protein) was fused to the coding regions Photorhabdus TcdB2 (a Class B protein) and TccC3 (a Class C protein) via the 8920 double fusion (tcdB2/tccC3) to create the triple fusion gene xptA2/tcdB2/tccC3. This novel triple fused gene is called 8811 (SEQ ID NO:59) and encodes polypeptide 8811 (SEQ ID NO:60). Lysates containing the 8811 fusion protein demonstrated excellent functional activity. This invention reduces by two thirds the number of transcriptional control sequences required for expression in plants and other organisms and eliminates the disadvantages that accompany transformation of separate, complete genes. This invention also provides a mechanism for maintaining physical and temporal synchrony of translation for interacting proteins, particularly in eukaryotic cells.

[0283] The 3′ end of the coding region of the Toxin Complex Toxin XptA2 was modified in a multi step process, using standard molecular biology techniques. Likewise, the 5′ end of the 8920 coding region was modified. The two modified coding regions were joined by a synthetic nucleotide linker to create a single open reading frame. The fused gene consisting of the coding regions for XptA2, TcdB2 and TccC3, was engineered into an E. coli expression plasmid under control of a modified lac promoter. The construction was done in such a way as to maintain appropriate bacterial transcription and translation signals. The plasmid was designated pDAB8811. The DNA sequence of the fused coding region cassette is shown in SEQ ID NO:59. The cassette is 15,036 nucleotides in length and contains coding regions for XptA2 (nts 34-7647), the XptA2/TcdB2 linker peptide (nts 7648-7674), TcdB2 (nts 7675-12096), the TcdB2/TccC3 linker peptide (nts 12097-12138) and TccC3 (nts 12139-15018). The polypeptide encoded by the fused gene in SEQ ID NO:59 is shown in SEQ ID NO:60. The fusion protein is predicted to contain 4,995 amino acids with segments representing XptA2 (residues 1-2538), the XptA2/TcdB2 linker peptide (residues 2539-2547), TcdB2 (residues 2548-4021), the TcdB2/TccC3 linker peptide (residues 4022-4035) and TccC3 (residues 4036-4995). A summary of the DNA and protein segments of the triple fusion is presented in Table 6. The amino acid sequences of the two linkers (XptA2/TcdB2 and TcdB2/TccC3) are shown in Table 7.

### EXAMPLE 12

### Expression Conditions of pDAB8811 and Lysate Preparations

[0284] The expression plasmids pBT (empty vector control described in U.S. application Ser. No. 10/754,115, filed Jan. 7, 2003), pDAB8812 (contains the XptA2 only encoding region) and pDAB8811 (contains the 8811 coding region) were transformed into the E. coli expression strain BL21 (Novagen, Madison Wis.) using standard methods. Expression cultures were initiated with 10-200 freshly transformed colonies into 200 mL LB medium containing 50 μg/ml antibiotic and 75 μM IPTG (isopropyl-α-D-thiogalatopyranoside). The cultures were grown at 28° C. for 24 hours at 180-200 rpm. The cells were collected by centrifugation in 250 ml Nalgene bottles at 3,400×g for 10 minutes at 4° C. The pellets were suspended in 4-4.5 mL Butterfield's Phosphate solution (Hardy Diagnostics, Santa Maria, Calif.; 0.3 mM potassium phosphate pH 7.2). The suspended cells were transferred to 50 mL polypropylene screw cap centrifuge tubes with 1 mL of 0.1 mm diameter glass beads (Biospec, Bartlesville, Okla., catalog number 1107901). The cell-glass bead mixture was chilled on ice, then the cells were lysed by sonication with two 45 second bursts using a 2 mm probe with a Branson Sonifier 250 (Danbury Conn.) at an output of ˜30, chilling completely between bursts. The lysates were transferred to 2 mL Eppendorf tubes and centrifuged 5 minutes at 16,000×g. Analysis of the lysates by SDS-PAGE as described above showed a Coomassie blue staining band of greater than 500 kDa present in 8811 lysates corresponding to the triple fusion 8811 protein which was not present in controls or XptA2 lysates. The supernatants were collected and submitted for bioassay.

### EXAMPLE 13

### Bioassay Conditions for Triple Fusion 8811 Lysates

[0285] Insect bioassays were conducted with neonate larvae on artificial diets in 128-well trays specifically designed for insect bioassays (C-D International, Pitman, N.J.). The species assayed was corn earworm, Helicoverpa zea (Boddie). Bioassays were incubated under controlled environmental conditions (28° C., ˜40% r.h., 16:8 [L:D]) for 5 days at which point the total number of insects in the treatment, the number of dead insects, and the weight of surviving insects were recorded. The biological activity of the crude lysates was assayed as follows. Crude E. coli lysates (40 μL) of either control cultures or those expressing the triple fusion protein 8811 were applied to the surface of artificial diet in 8 wells of a bioassay tray. The average surface area of treated diet in each well was ˜1.5 cm².

### EXAMPLE 14

### Bioassay Results for Triple Fusion 8811 Lysates

[0286] Table 10 shows the bioassay results for lysates of cells programmed to express the protein XptA2 alone or the fusion protein 8811, as compared to control lysates (empty vector). The data show that lysates prepared from cells programmed to express the triple fusion 8811 severely limited the growth of the insects. The control lysates, either the empty vector or XptA2 alone, had little effect on insect growth. These data clearly demonstrate that the lysates programmed to express the triple fusion protein 8811 are much more effective than lysates programmed to express the XptA2 protein alone.

TABLE 10
Response of corn earworm (Helicoverpa zea (Boddie) to
E. coli lysates expressing Toxin Complex proteins.

| | | Growth Inhibition |
|---|---|---|
| Sample | Lysate Tested | Corn Earworm |
| pBT280 | Empty vector | 0 |
| | control | |
| pDAB8812 | XptA2 | 0 |
| pDAB8811 clone 1 | 8811 | ++++ |
| pDAB8811 clone 2 | 8811 | ++++ |
| pDAB8811 clone 3 | 8811 | ++++ |
| pDAB8811 clone 4 | 8811 | ++++ |

Two independent expression culture lysates were tested for each sample. Eight insects used per test.
Growth Inhibition Scale:
0 = 0-20%;
+ = 21-40%;
++ = 41-60%;
+++ = 61-80%;
++++ = 81-100%.

### EXAMPLE 15

### Binding of TcdB2/TccC3 Fusion Proteins to Immobilized XptA2

[0287] To determine the relative affinity of the various TcdB2/TccC3 fusion proteins to interact with the XptA2 protein, XptA2 was immobilized onto a CM5 chip using standard amine coupling techniques as described above. Binding was determined by measuring surface plasmon resonance (SPR) on a Biacore 3000 SPR spectrometer, and the level of binding was measured in resonance units (RU). Approximately 5,000 RU of XptA2 was immobilized on the chip. Lysates were prepared from E. coli cultures programmed to express the fusion proteins 8920, 8921, 8923 and 8940. The lysates were diluted 1:10 and were flowed over the immobilized XptA2 protein at a rate of 30 microliters/min for 200 seconds. At that time, flowing of the cell lysate was stopped, and buffer solution only was flowed over the XptA2 protein. The switch from cell lysate to buffer only allowed the bound TcdB2/TccC3 fusion proteins to dissociate from XptA2. Dissociation was measured 200 seconds after switching from cell lysate to buffer only, and was expressed as the difference between the RU measured immediately after 200 seconds of cell lysate flowing and the RU measured after 200 seconds of flowing only the buffer solution. Results from these experiments are shown in Table 11. All four soluble lysates containing the TcdB2/TccC3 fusions protein bound to the immobilized XptA2 strongly, between 733-836 RU. Very little dissociation occurred after binding (17.9-21.4 RU).

TABLE 11

| | Binding after | Dissociation after |
|---|---|---|
| Analyte | 200 sec. (RU) | 200 sec. (RU) |
| pET lysate (control) | 23.6 | 14.1 |
| 8940 (5 aa linker) | 830.6 | 17.9 |
| 8920 (14 aa linker) | 836.4 | 19.0 |
| 8921 (38 aa linker) | 764.9 | 18.8 |
| 8923 (93 aa linker) | 733.0 | 21.4 |

### EXAMPLE 16

### Comparative Non-Fused and Fused Activity and Binding Studies of the Purified TcdB2/TccC3 Fusion Protein 8920

[0288] In an effort to more fully characterize the activity the TcdB2/TccC3 fusion protein (referred to herein as the 8920 protein) as compared to a non-fused TcdB2+TccC3 protein complex, the fusion proteins or complexes were purified from bacterial cultures programmed to express these proteins heterologously. The purified samples were then bioassayed with added Class A proteins (XptA2 or TcdA). In addition, the ability of these two samples to bind immobilized XptA2 was measured by Surface Plasmon Resonance.

[0289] Purification.

[0290] A two liter culture of recombinant E. coli cells producing either the 8920 fusion protein or the TcdB2+TccC3 complex was grown overnight, the cells were centrifuged, and the cell pellet was frozen at −80° C. for storage. The cell pellet was rapidly defrosted under cold water and suspended in 250 mL of 50 mM Tris-HCl pH 8.0, 0.10 M NaCl, 1 mM DTT, 10% glycerol and lysozyme (0.6 mg/mL). A small amount of glass beads (0.5 mm, Biospec, Bartlesville, Okla., catalog number 1107901) was added and the solution gently shaken to facilitate suspension. The cells were then disrupted in approximately 50 mL batches by sonication at maximum output power (Branson Sonifier Model 250 with a microprobe) two times for 30 seconds, keeping the lysate cold using an ice bath. The broken cells were then centrifuged at 48,000×g for 60 min at 4° C. The supernatant was collected and 4.0 mL of a general protease inhibitor from Sigma Chemical Company (St. Louis, Mo.; Catalog No. P2714) were added. The solution was diluted 2-fold with cold distilled water, then loaded onto a Q Sepharose XL anion exchange column (1.6 cm×10 cm). Bound proteins were first washed with 250 mL of 25 mM Tris-HCl, pH 8.0,+50 mM NaCl, and then eluted with 50 mM Tris HCl pH 8.0+300 mM NaCl (250 mL). The eluted protein solution was dialyzed overnight against 25 mM Tris-HCl, pH 8.0 and then loaded onto a Mono Q 10/10 anion exchange column (1 cm×10 cm). The protein was eluted with a gradient of 0 to 500 mM NaCl in 25 mM Tris-HCl, pH 8.0 in 15 column volumes at 2 mL/min, taking 3 mL fractions. Fractions containing the 8920 fusion protein (or the TcdB2+TccC3 complex) eluted at about 120 mM NaCl. These fractions were combined, diluted, and re-loaded onto the Mono Q 10/10 column and eluted with a shallow gradient of 0 to 300 mM NaCl in 25 mM Tris-HCl, pH 8.0 as before, but taking 2 mL fractions. Fractions containing the 8920 fusion protein (or the TcdB2+TccC3 complex) were combined and concentrated to approximately 1.0 mL, and loaded onto a Superose 200 size exclusion column (1.6 cm×60 cm), equilibrated in 50 mM Tris-HCl, pH 8.0, with 100 mM NaCl, 5% glycerol, 0.05% Tween-20. Proteins were eluted at a flow rate of 1.0 mL/min. Fractions corresponding to either the 8920 fusion protein or the TcdB2+TccC3 complex were combined and analyzed by SDS-PAGE to confirm their identity and purity.

[0291] Insect Bioassays.

[0292] Corn earworm (CEW, Helicoverpa zea) used in these studies were supplied as eggs by the insectary at North Carolina State University (Raleigh, N.C.). Southern corn rootworm eggs (SCR, Diabrotica undecimpunctata howardi) were supplied by FrenchAg Research, Lamberton, Minn., or Crop Characteristics, Inc., Farmington, Minn. The eggs were washed and held at 24° C. and 50% RH until they hatched. The artificial diet consisted of 2-4% powdery solids such as soy flour, yeast, wheat germ, casein, sugar, vitamins, and cholesterol suspended in a 1.0-2.0% dissolved agar in water matrix. For bioassay, proteins or protein complexes were diluted in 3- or 4-fold increments into 10 mM sodium phosphate buffer, pH 7.0 to concentrations ranging from 500 to 0.48 ng protein per cm², then applied to the surface of the artificial diet. Each concentration was assayed separately in 8 replications by placing newly emerged neonates onto the treated diet and holding the test at 28° C. for five days. In some of the tests, the weights of the larvae were measured at the end of the time period, in addition to recording mortality or stunting of the insects. Dead larvae were scored as zero weight.

[0293] Binding Assays.

[0294] Binding of TcdB2+TccC3 and the 8920 fusion protein to XptA2 was measured by surface plasmon resonance (SPR) spectroscopy using a BiaCore 3000 instrument. Briefly, highly purified (0.05 mg/mL) XptA2 in 10 mM sodium acetate, pH 4.8 was coupled to a CM4 chip previously activated with N-hydroxysuccinimide and N-ethyl-N′-(dimethylaminopropyl)carbodiimide (as per the manufacturer's instructions) to achieve 2,000 resonance units (RU) of immobilization. After XptA2 immobilization, the remaining active amine groups were blocked with 1 M ethanolamine hydrochloride, pH 8.5. Binding to XptA2 was measured by flowing 200 μL of 100 nM of TcdB2+TccC3 or 25 nM 8920 fusion protein (in 10 mM HEPES pH 7.4, 150 mM NaCl, and 0.005% Surfactant P20) over the chip at a flow rate of 30 μL/min. Changes in RU were measured, and the rate of change fitted to a non-linear regression curve to obtain the rate of association of TcdB2+TccC3 or 8920 fusion protein to the XptA2.

[0295] Bioassay Results.

[0296] The increased effectiveness of the 8920 fusion protein to potentiate the Class A protein XptA2 against CEW larvae, as compared to the TcdB2+TccC3 complex, is shown in Table 12, Panels A and B. In these experiments, the concentration of XptA2 was held constant at 250 ng/cm². In Panel A, the killing/stunting activity of the XptA2+TcdB2+TccC3 complex is shown. The data demonstrate that killing/stunting activity dramatically decreases at concentrations of TcdB2+TccC3 below 7.8 ng/cm². In contrast, Panel B shows the more potent killing/stunting activity of the XptA2+8920 TcdB/TccC3 fusion protein complex. In this case, the XptA2+8920 combination is effective in causing stunting of all the test larvae at 1.9 ng/cm² of the 8920 fusion protein. Surprisingly, these data demonstrate that the 8920 fusion protein is at least 4× as effective as the non-fused parental proteins TcdB2+TccC3.

TABLE 12
Demonstration of the insect activity of XptA2 (250 ng/cm²) in
the presence of increasing concentrations of either purified
TcdB2 + TccC3 complex (Panel A) or the
TcdB2/TccC3 fusion protein 8920 (Panel B).

| Panel A | | | | Panel B | | | |
|---|---|---|---|---|---|---|---|
| Concen- | | | | Concen- | | | |
| tration of | | | | tration | | | |
| TcdB2 + | Corn Earworm | | | of 8920 | Corn Earworm | | |
| TccC3 | Larvae | | | Fusion | Larvae | | |
| (ng/cm²) | Dead | Stunted | Total | (ng/cm²) | Dead | Stunted | Total |
| 500 | 8 | 0 | 8 | 500 | 8 | 0 | 8 |
| 125 | 6 | 2 | 8 | 125 | 6 | 2 | 8 |
| 31.2 | 0 | 8 | 8 | 31.2 | 0 | 8 | 8 |
| 7.8 | 1 | 7 | 8 | 7.8 | 0 | 8 | 8 |
| 1.9 | 0 | 2 | 8 | 1.9 | 0 | 8 | 8 |
| 0.48 | 0 | 1 | 8 | 0.48 | 0 | 0 | 8 |

[0297] Additional bioassays against SCR and CEW larvae were performed using various concentrations of the 8920 fusion protein added to 500 ng/cm² of either TcdA (tested against SCR), or XptA2 (tested against CEW). The results are shown in Table 13. These data clearly demonstrate that even low concentrations of the 8920 fusion protein are very effective at potentiating 500 ng/cm² of either TcdA or XptA2.

TABLE 13
Demonstration of the effectiveness of the TcdB2/TccC3 fusion protein 8920
to potentiate both TcdA (assayed against southern corn rootworm) and XptA2
(assayed against corn earworm). Various concentrations of 8920 were added to
500 ng/cm² of either TcdA or XptA2. Total weights of the 8 insect larvae are shown.

| Concentration | Southern Corn Rootworm | | | | | | | |
|---|---|---|---|---|---|---|---|---|
| of 8920 Fusion | Larvae | | | | Corn Earworm Larvae | | | |
| (ng/cm²) | Dead | Stunted | Total | Weight | Dead | Stunted | Total | Weight |
| 300 | 8 | 0 | 8 | 0 | 8 | 0 | 8 | 0 |
| 100 | 8 | 0 | 8 | 0 | 8 | 0 | 8 | 0 |
| 33 | 8 | 0 | 8 | 0 | 8 | 0 | 8 | 0 |
| 11 | 7 | 1 | 8 | 0.01 | 3 | 5 | 8 | 0.8 |
| 3.7 | 1 | 0 | 8 | 0.5 | 2 | 6 | 8 | 0.9 |
| 1.2 | 2 | 0 | 8 | 0.6 | 2 | 6 | 8 | 1.8 |
| 0.4 | 0 | 0 | 8 | 1.4 | 4 | 4 | 8 | 0.9 |
| 0 | 0 | 0 | 8 | 2.2 | 0 | 3 | 8 | 84.3 |

[0298] Binding Results:

[0299] The rate of binding of TcdB2+TccC3 to XptA2 was compared to that of the 8920 fusion protein by SPR. The sensorgrams are shown in FIG. 1. The association rate of the 8920 fusion protein (ka=1.03×10⁶) was at least 20-fold greater than the association rate of TcdB2+TccC3 (ka=4.49×10⁴). Once bound, neither protein dissociated readily from XptA2. This increased rate of binding of the 8920 fusion protein to XptA2 is expected to increase the effectiveness of the XptA2+8920 complex, as compared to XptA2+TcdB2+TccC3. This is expectation is consistent with the observation shown above in this example (Table 13), that is, that lower concentrations of 8920 fusion protein are required to potentiate the Class A protein XptA2.

### EXAMPLE 17

### Construction of the Gene Encoding the Triple Fusion Protein 8836 (TcdB2/TccC3/XptA2_{xwi})

[0300] This Example and Examples 18-20 relate to construction and testing of a translational fusion between three coding regions. The coding region of the 8920 (tcdB2/tccC3) double fusion of Photorhabdus TcdB2 (a Class B protein) and TccC3 (a Class C protein) was additionally fused to the coding region of the Xenorhabdus protein XptA2_{xwi} (a Class A protein) to create the triple fusion gene tcdB2/tccC3/xptA2_{xwi}. This novel triple fused gene is called 8836 (SEQ ID NO:67) and encodes polypeptide 8836 (SEQ ID NO:68). This fusion protein differs from the 8811 triple fusion protein XptA2_{xwi}/TcdB2/TccC3 described in Example 14 above, in that the order of the coding regions corresponding to the individual proteins has been changed. Lysates containing the 8836 fusion protein demonstrated excellent functional activity. This invention reduces by two thirds the number of transcriptional control sequences required for expression in plants and other organisms and eliminates the disadvantages that accompany transformation of separate, complete genes. This invention also provides a mechanism for maintaining physical and temporal synchrony of translation for interacting proteins, particularly in eukaryotic cells. In addition, this example demonstrates that the order in which the coding regions corresponding to the Class A, Class B, and Class C proteins exist within a primary transcription product can be altered without interfering with the resulting activities of the translated fusion protein.

[0301] The 5′ end of the coding region of the Toxin Complex Class A protein XptA2_{xwi} was modified in a multi-step process, using standard molecular biology techniques. Likewise, the 3′ end of the 8920 coding region was modified. The two modified coding regions were joined by a synthetic nucleotide linker to create a single open reading frame. The fused gene consisting of the linked coding regions for TcdB2, TccC3, and XptA2_{xwi} was engineered as a single open reading frame, in a pET expression plasmid vector (Novagen, Madison Wis.). The construction was done in such a way as to maintain appropriate bacterial transcription and translation signals, and the resulting plasmid was designated pDAB8836. The DNA sequence of the fused coding region cassette is shown in SEQ ID NO:67. The cassette is 15,067 nucleotides in length and contains coding regions encoding TcdB2 (nts 484469), the TcdB2/TccC3 linker peptide (nts 4470-4511), TccC3 (nts 4512-7391), the TccC3/XptA2_{xwi} linker peptide (nts 7392-7436) and XptA2_{xwi} (nts 7437-15050). The polypeptide encoded by the fused gene in SEQ ID NO:67 is shown in SEQ ID NO:68. The fusion protein is predicted to contain 5,001 amino acids, with segments representing TcdB2 (residues 1-1474), the TcdB2/TccC3 linker peptide (residues 1475-1488), TccC3 (residues 1489-2448), the TccC3/XptA2_{xwi} linker peptide (residues 2449-2463) and XptA2_{xwi} (residues 2464-5001).

### EXAMPLE 18

### Expression Conditions for pDAB8836 and Lysate Preparations

[0302] The Class A TC protein XptA2_{xwi} was utilized in a purified form prepared from cultures of Pseudomonas fluorescens heterologously expressing the gene. The expression plasmids pET (empty vector control), pDAB8920, and pDAB8836 were transformed into the E. coli T7 expression strain BL21(DE3) Star (Invitrogen, Carlsbad, Calif.) using standard methods. Expression cultures were initiated with 10-200 freshly transformed colonies into 250 mL LB medium containing 50 μg/mL antibiotic and 75 μM IPTG (isopropyl-α-D-thiogalactopyranoside). The cultures were grown at 28° C. for 48 hours at 180-200 rpm. Then the cells were collected by centrifugation-at 5,000×g for 20 minutes at 4° C. After the cell pellets were suspended in 4-4.5 mL Butterfield's Phosphate solution (Hardy Diagnostics, Santa Maria, Calif.; 0.3 mM potassium phosphate pH 7.2), they were transferred to 50 mL polypropylene screw cap centrifuge tubes with 1 mL of 0.1 mm diameter glass beads (Biospec, Bartlesville, Okla., catalog number 1107901) and chilled on ice. The cells were lysed by sonication with two 45 second bursts using a 2 mm probe with a Branson Sonifier 250 (Danbury, Conn.) at an output of ˜30, chilling completely between bursts. The lysates were transferred to 2 mL Eppendorf tubes and centrifuged 5 minutes at 16,000×g. Analysis of the lysates by SDS-PAGE as described above showed a Coomassie blue-staining band of greater than 500 kDa present in lysates of 8836, corresponding to the triple fusion 8836 protein (calculated size of 560.6 kDa). The high molecular weight band was not present in lysates of control cells.

### EXAMPLE 19

### Bioassay Conditions for the Triple Fusion 8836 Lysates

[0303] Insect bioassays were conducted with neonate corn earworm larvae, (Helicoverpa zea (Boddie)) on artificial diets in 128-well trays specifically designed for insect bioassays (C-D International, Pitman, N.J.). Bioassays were incubated under controlled environmental conditions (28° C., ˜40% relative humidity, 16 h:8 h [Light:Dark]) for 5 days, at which point the total number of insects in the treatment, the number of dead insects, and the weights of surviving insects were recorded.

[0304] The biological activity of the crude lysates alone or with added XptA2_{xwi} toxin protein was assayed as follows. Crude E. coli lysates (40 μL) (concentration ranging between 12-17 mg/mL) of either control cultures or those expressing Toxin Complex proteins were applied to the surface of artificial diet in 8 wells of a bioassay tray. The average surface area of treated diet in each well was ˜1.5 cm². The empty vector control and TcdB2/TccC3 fusion protein 8920 lysates were applied with, and without, XptA2_{xwi}. The XptA2_{xwi} protein was added as a highly purified preparation from bacterial cultures heterologously expressing the protein. Additionally, purified XptA2_{xwi} was mixed with Butterfield's Phosphate solution as a control. The final concentration of XptA2_{xwi} on the diet was 250 ng/cm².

### EXAMPLE 20

### Bioassay Results for Triple Fusion 8836 Lysates

[0305] Table 14 shows the bioassay results for control lysates, lysates of cells programmed to express the TcdB2/TccC3 fusion protein 8920, and lysates of cells programmed to express the triple TcdB2/TccC3/XptA2_{xwi} fusion protein 8836. The control lysates and the 8920 lysates were bioassayed plus and minus purified XptA2_{xwi}. The data show that control lysates, with and without XptA2_{xwi,} had little effect on the insects. Lysates containing only the TcdB2/TccC3 fusion protein 8920 had no effect without added XptA2_{xwi}. However, with added XptA2, the 8920 lysate was a potent inhibitor of insect growth, as shown in the Examples above. Lysates programmed to express the triple TcdB2/TccC3/XptA2_{xwi} fusion protein 8836 were extremely potent inhibitors of insect growth without added XptA2_{xwi}. These data, and the data from Example 14 above, demonstrate that triple fusion proteins consisting of XptA2_{xwi}, TcdB2 and TccC3 are functional and highly potent. Further, these data, together with those of Example 14, demonstrate the surprising result that the function of the triple fusion protein is preserved regardless of the order of the separate protein domains within the fusion protein.

TABLE 14
Response of corn earworm (Helicoverpa zea (Boddie) to
E. coli lysates expressing Toxin Complex proteins.

| | | Growth Inhibition |
|---|---|---|
| Sample | Lysate Tested | Corn Earworm |
| pET280 | Empty vector control | + |
| pET280 + XptA2_{xwi} | Empty vector control | 0 |
| Purified XptA2_{xwi} | XptA2_{xwi} | 0 |
| pDAB8920 | 8920 (TcdB2/TccC3) | 0 |
| pDAB8920 + XptA2_{xwi} | 8920 (TcdB2/TccC3) | ++++ |
| pDAB8836 | 8836 | ++++ |
| | (TcdB2/TccC3/XptA2) | |

Eight insects used per test.
Growth Inhibition Scale:
0 = 0-20%;
+ = 21-40%;
++ = 41-60%;
+++ = 61-80%;
++++ = 81-100%.

The application's sequence listing, which the Patent Office published only in electronic form, follows.

SEQUENCE LISTING (68 sequences)

SEQ ID NO: 1 - DNA, 7409 bp, Photorhabdus luminescens
  misc_feature (48)..(4469): TcdB2 coding region
  misc_feature (4470)..(4511): Linker coding region
  misc_feature (4512)..(7394): TccC3 coding region
tctagactgagtcgacgcactactagtaacaaagaaggagatataccatgcaaaattcacaagattttagtattacggaactgtcactgcccaaaggggggggcgctatcacgggaatgggtgaagcattaacccccactggaccggatggtatggccgcgctatctctaccattgcctatttctgccgggcgcggttatgctcccgcattcactctgaattacaacagcggcgccggtaacagtccatttggtctgggttgggattgcaacgttatgactatccgccgccgcacccattttggcgtcccccattatgacgaaaccgatacctttttggggccagaaggcgaagtgctggtggtagcggatcaacctcgcgacgaatccacattacagggtatcaatttaggcgccacctttaccgttaccggctaccgttcccgtctggaaagccatttcagccgattggaatattggcaacccaaaacaacaggtaaaacagatttttggttgatatatagcccagatgggcaggtgcatctactgggtaaatcaccgcaagcgcggatcagcaacccatcccaaacgacacaaacagcacaatggctgctggaagcctctgtatcatcacgtggcgaacaaatttattatcaatatcgcgccgaagatgacacaggttgcgaagcagatgaaattacgcaccatttacaggctacagcgcaacgttatttacacatcgtgtattacggcaaccgtacagccagcgaaacattacccggtctggatggcagcgccccatcacaagcagactggttgttctatctggtatttgattacggcgaacgcagtaacaacctgaaaacgccaccagcattttcgactacaggtagctggctttgccgtcaggaccgtttttcccgttatgaatatggctttgagattcgtacccgccgcttatgccgtcaggtattgatgtaccatcacctgcaagcactggatagtaagataacagaacacaacggaccaacgctggtttcacgcctgatactcaattacgacgaaagcgcgatagccagcacgctagtattcgttcgccgagtgggacacgagcaagatggtaatgtcgtcaccctgccgccattagaattggcatatcaggatttttcaccgcgacatcacgctcactggcaaccaatggatgtactggcaaacttcaatgccattcagcgctggcagctagtcgatctaaaaggcgaaggattacccggcctgttatatcaggataaaggcgcttggtggtaccgctccgcacagcgtctgggcgaaattggctcagatgccgtcacttgggaaaagatgcaacctttatcggttattccttctttgcaaagtaatgcctcgttggtggatatcaatggagacggccaacttgactgggttatcaccggaccgggattacggggatatcatagtcaacgcccggatggcagttggacacgttttaccccactcaacgctctgccggtggaatacacccatccacgcgcgcaactcgcagatttaatgggagccgggctatccgatttggtgctgatcggccctaagagcgtgcgtttatatgccaatacccgcgacggctttgccaaaggaaaagatgtggtgcaatccggtgatatcacactgccggtgccgggcgccgatccacgtaagttggtggcgtttagtgatgtattgggttcaggtcaagcccatctggttgaagtaagcgcgactaaagtcacctgctggcctaatctggggcgcggacgttttggtcaacccattaccttaccgggattcagccagccagcaaccgagtttaacccggctcaagtttatctggccgatctggatggcagcggtccaacggatctgatttatgttcatacaaaccgtctggatatcttcctgaacaaaagtggcaatggctttgctgaaccagtgacattacgcttcccggaaggtctgcgttttgatcatacctgtcagttacaaatggccgatgtacaaggattaggcgtcgccagcctgatactgagcgtgccgcatatgtctccccatcactggcgctgcgatctgaccaacatgaagccgtggttactcaatgaaatgaacaacaatatgggggtccatcacaccttgcgttaccgcagttcctcccaattctggctggatgaaaaagccgcggcgctgactaccggacaaacaccggtttgctatctccccttcccgatccacaccctatggcaaacggaaacagaagatgaaatcagcggcaacaaattagtcacaacacttcgttatgctcgtggcgcatgggacggacgcgagcgggaatttcgcggatttggttatgtagagcagacagacagccatcaactggctcaaggcaacgcgccagaacgtacgccaccggcgctgaccaaaaactggtatgccaccggactgccggtgatagataacgcattatcaaccgagtattggcgtgatgatcaggcttttgccggtttctcaccgcgctttacgacttggcaagataacaaagatgtcccgttaacaccggaagatgataacagtcgttactggttcaaccgcgcgttgaaaggtcaactgctacgtagtgaactgtacggattggacgatagtacaaataaacacgttccctatactgtcactgaatttcgttcacaggtacgtcgattacagcataccgacagccgataccctgtactttggtcatctgtagttgaaagccgcaactatcactacgaacgtatcgccagcgacccgcaatgcagtcaaaatattacgctatccagtgatcgatttggtcagccgctaaaacagctttcggtacagtacccgcgccgccagcagccagcaatcaatctgtatcctgatacattgcctgataagttgttagccaacagctatgatgaccaacaacgccaattacggctcacctatcaacaatccagttggcatcacctgaccaacaataccgttcgagtattgggattaccggatagtacccgcagtgatatctttacttatggcgctgaaaatgtgcctgctggtggtttaaatctggaacttctgagtgataaaaatagcctgatcgcggacgataaaccacgtgaatacctcggtcagcaaaaaaccgcttataccgatggacaaaatacaacgccgttgcaaacaccaacacggcaagccctgattgcctttaccgaaacaacggtattcaaccagtccacattatcagcgtttaacggaagcatcccgtccgataaattatcaacgacgctggagcaagctggatatcagcaaacaaattatctattccctcgcactggagaagataaagtttgggtagcccatcacggctataccgattatggtacagcggcacagttctggcgcccgcaaaaacagagcaacacccaactcaccggtaaaatcaccctcatctgggatgcaaactattgcgttgtggtacaaacccgggatgctgctggactgacaacctcagccaaatatgactggcgttttctgaccccggtgcaactcaccgatatcaatgacaatcagcaccttatcacactggatgcattgggccgaccaatcacattgcgcttttggggaactgaaaacggcaagatgacaggttattcctcaccggaaaaagcatcattttctccaccatccgatgttaatgccgctattgagttaaaaaaaccgctccctgtagcacagtgtcaggtctacgcaccagaaagctggatgccagtattaagtcagaaaaccttcaatcgactggcagaacaagattggcaaaagttatataacgcccgaatcatcaccgaagatggacgtatctgcacactggcttatcgccgctgggtacaaagccaaaaggcaatccctcaactcattagcctgttaaacaacggaccccgtttacctcctcacagcctgacattgacgacggatcgttatgatcacgatcctgagcaacagatccgtcaacaggtggtattcagtgatggctttggccgcttgctgcaagccgctgcccgacatgaggcaggcatggcccggcaacgcaatgaagacggctctttgattataaatgtccagcatactgagaaccgttgggcagtgactggacgaacggaatatgacaataaggggcaaccgatacgtacctatcagccctatttcctcaatgactggcgatacgtcagcaatgatagtgcccggcaggaaaaagaagcttatgcagatacccatgtctatgatcccataggtcgagaaatcaaggttatcaccgcaaaaggttggttccgtcgaaccttgttcactccctggtttactgtcaatgaagatgaaaatgacacagccgctgaggtgaagaaggtaaagatgccgggatccgacaacaagggtcagactatccgcactaggcctatgaaaaacatcgatcccaaactttatcaaaaaacccctactgtcagcgtttacgataaccgtggtctgataatccgtaacatcgattttcatcgtactaccgcaaatggtgatcccgatacccgtattacccgccatcaatacgatattcacggacacctaaatcaaagcatcgatccgcgcctatatgaagccaagcaaaccaacaatacgatcaaacccaattttctttggcagtatgatttgaccggtaatcccctatgtacagagagcattgatgcaggtcgcactgtcaccttgaatgatattgaaggccgtccgctactaacggtgactgcaacaggggttatacaaactcgacaatatgaaacttcttccctgcccggtcgtctgttatctgttgccgaacaaacacccgaggaaaaaacatcccgtatcaccgaacgcctgatttgggctggcaataccgaagcagagaaagaccataaccttgccggccagtgcgtgcgtcactatgacacggcgggagttacccggttagagagtttatcactgaccggtactgttttatctcaatccagccaactattgatcgacactcaagaggcaaactggacaggtgataacgaaaccgtctggcaaaacatgctggctgatgacatctacacaaccctgagcaccttcgatgccaccggtgctttactgactcagaccgatgcgaaagggaacattcagagactggcttatgatgtggccgggcagctaaacgggagctggctaacactcaaaggccagacggaacaagtgattatcaaatccctgacctactccgccgccggacaaaaattacgtgaggaacacggcaatgatgttatcaccgaatacagttatgaaccggaaacccaacggctgatcggtatcaaaacccgccgtccgtcagacactaaagtgctacaagacctgcgctatgaatatgacccggtaggcaatgtcatcagcatccgtaatgacgcggaagccacccgcttttggcacaatcagaaagtgatgccggaaaacacttatacctacgattccctgtatcagcttatcagcgccaccgggcgcgaaatggcgaatataggtcaacaaagtcaccaatttccctcacccgctctaccttctgataacaacacctataccaactatacccgtacttatacttatgaccgtggcggcaatctgaccaaaatccagcacagttcaccggcgacgcaaaacaactacaccaccaatatcacggtttcaaatcgcagcaaccgcgcagtactcagcacattgaccgaagatccggcgcaagtagatgctttgtttgatgcaggcggacatcagaacaccttgatatcaggacaaaacctgaactggaatactcgtggtgaactgcaacaagtaacactggttaaacgggacaagggcgccaatgatgatcgggaatggtatcgttatagcggtgacggaagaaggatgttaaaaatcaatgaacagcaggccagcaacaacgctcaaacacaacgtgtgacttatttgccgaacttagaacttcgtctaacacaaaacagcacggccacaaccgaagatttgcaagttatcaccgtaggcgaagcgggccgggcacaggtacgagtattacattgggagagcggtaaaccggaagatatcgacaataatcagttgcgttatagttacgataatcttatcggttccagtcaacttgaattagatagcgaaggacaaattatcagtgaagaagaatattatccctatggtggaacagcattatgggccgccaggaatcagacagaagccagttataaaactatccgttattcaggcaaagagcgggatgccaccgggctatattactacggctatcggtattaccaaccgtggataggacggtggttaagctccgatccggcaggaacaatcgatgggctgaatttatatcggatggtgaggaataatccagttaccctccttgatcctgatggattaatgccaacaattgcagaacgcatagcagcactaaaaaaaaataaagtaacagactcagcgccttcgccagcaaatgccacaaacgtagcgataaacatccgcccgcctgtagcaccaaaacctagcttaccgaaagcatcaacgagtagccaaccaaccacacaccctatcggagctgcaaacataaaaccaacgacgtctgggtcatctattgttgctccattgagtccagtaggaaataaatctacttctgaaatctctctgccagaaagcgctcaaagcagttcttcaagcactacctcgacaaatctacagaaaaaatcatttactttatatagagcagataacagatcctttgaagaaatgcaaagtaaattccctgaaggatttaaagcctggactcctctagacactaagatggcaaggcaatttgctagtatctttattggtcagaaagatacatctaatttacctaaagaaacagtcaagaacataagcacatggggagcaaagccaaaactaaaagatctctcaaattacataaaatataccaaggacaaatctacagtatgggtttctactgcaattaatactgaagcaggtggacaaagctcaggggctccactccataaaattgatatggatctctacgagtttgccattgatggacaaaaactaaatccactaccggagggtagaactaaaaacatggtaccttcccttttactcgacaccccacaaatagagacatcatccatcattgcacttaatcatggaccggtaaatgatgcagaaatttcatttctgacaacaattccgcttaaaaatgtaaaacctcataagagataattaatctgactcgag

SEQ ID NO: 2 - protein, 2448 aa, Photorhabdus luminescens
  misc_feature (1)..(1474): TcdB2
  misc_feature (1475)..(1488): Linker
  misc_feature (1489)..(2248): TccC3
MQNSQDFSITELSLPKGGGAITGMGEALTPTGPDGMAALSLPLPISAGRGYAPAFTLNYNSGAGNSPFGLGWDCNVMTIRRRTHFGVPHYDETDTFLGPEGEVLVVADQPRDESTLQGINLGATFTVTGYRSRLESHFSRLEYWQPKTTGKTDFWLIYSPDGQVHLLGKSPQARISNPSQTTQTAQWLLEASVSSRGEQIYYQYRAEDDTGCEADEITHHLQATAQRYLHIVYYGNRTASETLPGLDGSAPSQADWLFYLVFDYGERSNNLKTPPAFSTTGSWLCRQDRFSRYEYGFEIRTRRLCRQVLMYHHLQALDSKITEHNGPTLVSRLILNYDESAIASTLVFVRRVGHEQDGNVVTLPPLELAYQDFSPRHHAHWQPMDVLANFNAIQRWQLVDLKGEGLPGLLYQDKGAWWYRSAQRLGEIGSDAVTWEKMQPLSVIPSLQSNASLVDINGDGQLDWVITGPGLRGYHSQRPDGSWTRFTPLNALPVEYTHPRAQLADLMGAGLSDLVLIGPKSVRLYANTRDGFAKGKDVVQSGDITLPVPGADPRKLVAFSDVLGSGQAHLVEVSATKVTCWPNLGRGRFGQPITLPGFSQPATEFNPAQVYLADLDGSGPTDLIYVHTNRLDIFLNKSGNGFAEPVTLRFPEGLRFDHTCQLQMADVQGLGVASLILSVPHMSPHHWRCDLTNMKPWLLNEMNNNMGVHHTLRYRSSSQFWLDEKAAALTTGQTPVCYLPFPIHTLWQTETEDEISGNKLVTTLRYARGAWDGREREFRGFGYVEQTDSHQLAQGNAPERTPPALTKNWYATGLPVIDNALSTEYWRDDQAFAGFSPRFTTWQDNKDVPLTPEDDNSRYWFNRALKGQLLRSELYGLDDSTNKHVPYTVTEFRSQVRRLQHTDSRYPVLWSSVVESRNYHYERIASDPQCSQNITLSSDRFGQPLKQLSVQYPRRQQPAINLYPDTLPDKLLANSYDDQQRQLRLTYQQSSWHHLTNNTVRVLGLPDSTRSDIFTYGAENVPAGGLNLELLSDKNSLIADDKPREYLGQQKTAYTDGQNTTPLQTPTRQALIAFTETTVFNQSTLSAFNGSIPSDKLSTTLEQAGYQQTNYLFPRTGEDKVWVAHHGYTDYGTAAQFWRPQKQSNTQLTGKITLIWDANYCVVVQTRDAAGLTTSAKYDWRFLTPVQLTDINDNQHLITLDALGRPITLRFWGTENGKMTGYSSPEKASFSPPSDVNAAIELKKPLPVAQCQVYAPESWMPVLSQKTFNRLAEQDWQKLYNARIITEDGRICTLAYRRWVQSQKAIPQLISLLNNGPRLPPHSLTLTTDRYDHDPEQQIRQQVVFSDGFGRLLQAAARHEAGMARQRNEDGSLIINVQHTENRWAVTGRTEYDNKGQPIRTYQPYFLNDWRYVSNDSARQEKEAYADTHVYDPIGREIKVITAKGWFRRTLFTPWFTVNEDENDTAAEVKKVKMPGSDNKGQTIRTRPMKNIDPKLYQKTPTVSVYDNRGLIIRNIDFHRTTANGDPDTRITRHQYDIHGHLNQSIDPRLYEAKQTNNTIKPNFLWQYDLTGNPLCTESIDAGRTVTLNDIEGRPLLTVTATGVIQTRQYETSSLPGRLLSVAEQTPEEKTSRITERLIWAGNTEAEKDHNLAGQCVRHYDTAGVTRLESLSLTGTVLSQSSQLLIDTQEANWTGDNETVWQNMLADDIYTTLSTFDATGALLTQTDAKGNIQRLAYDVAGQLNGSWLTLKGQTEQVIIKSLTYSAAGQKLREEHGNDVITEYSYEPETQRLIGIKTRRPSDTKVLQDLRYEYDPVGNVISIRNDAEATRFWHNQKVMPENTYTYDSLYQLISATGREMANIGQQSHQFPSPALPSDNNTYTNYTRTYTYDRGGNLTKIQHSSPATQNNYTTNITVSNRSNRAVLSTLTEDPAQVDALFDAGGHQNTLISGQNLNWNTRGELQQVTLVKRDKGANDDREWYRYSGDGRRMLKINEQQASNNAQTQRVTYLPNLELRLTQNSTATTEDLQVITVGEAGRAQVRVLHWESGKPEDIDNNQLRYSYDNLIGSSQLELDSEGQIISEEEYYPYGGTALWAARNQTEASYKTIRYSGKERDATGLYYYGYRYYQPWIGRWLSSDPAGTIDGLNLYRMVRNNPVTLLDPDGLMPTIAERIAALKKNKVTDSAPSPANATNVAINIRPPVAPKPSLPKASTSSQPTTHPIGAANIKPTTSGSSIVAPLSPVGNKSTSEISLPESAQSSSSSTTSTNLQKKSFTLYRADNRSFEEMQSKFPEGFKAWTPLDTKMARQFASIFIGQKDTSNLPKETVKNISTWGAKPKLKDLSNYIKYTKDKSTVWVSTAINTEAGGQSSGAPLHKIDMDLYEFAIDGQKLNPLPEGRTKNMVPSLLLDTPQIETSSIIALNHGPVNDAEISFLTTIPLKNVKPHKR

SEQ ID NO: 3 - DNA, 42 bp, Artificial Sequence
  Nucleotide sequence of tcdB2-tccC3 linker
ccgggatccgacaacaagggtcagactatccgcactaggcct

SEQ ID NO: 4 - protein, 14 aa, Artificial Sequence
  Protein sequence encoded by TcdB2-TccC3 linker
PGSDNKGQTIRTRP

SEQ ID NO: 5 - protein, 1476 aa, Photorhabdus luminescens
MQNSQTFSVTELSLPKGGGAITGMGEALTPAGPDGMAALSLPLPISAGRGYAPSLTLNYNSGTGNSPFGLGWDCGVMAIRRRTSTGVPNYDETDTFLGPEGEVLVVALNEAGQADIRSESSLQGINLGATFTVTCYRSRLESHFNRLEYWQPQTTGATDFWLIYSPDGQVHLLGKNPQARISNPLNVNQTAQWLLEASISSHSEQIYYQYRAEDEAGCETDELAAHPSATVQRYLQTVHYGNLTASDVFPTLNGDDPLKSGWMFCLVFDYGERKNSLSEMPLFKATGNWLCRKDRFSRYEYGFELRTRRLCRQILMFHRLQTLSGQAKGDDEPALVSRLILDYDENAMVSTLVSVRRVGHEDNNTVTALPPLELAYQPFEPEQTALWQSMDVLANFNTIQRWQLLDLKGEGVPGILYQDRNGWWYRSAQRQAGEEMNAVTWGKMQLLPITPAVQDNASLMDINGDGQLDWVITGPGLRGYHSQHPDGSWTRFTPLHALPIEYSHPRAQLADLMGAGLSDLVLIGPKSVRLYVNNRDGFTEGRDVVQSGDITLPLPGADARKLVAFSDVLGSGQAHLVEVSATQVTCWPNLGHGRFGQPIVLPGFSQSAASFNPDRVHLADLDGSGPADLIYVHADRLDIFSNESGNGFAKPFTLSFPDGLRFDDTCQLQVADVQGLGVVSLILSVPHMAPHHWRCDLTNAKPWLLSETNNNMGANHTLHYRSSVQFWLDEKAAALATGQTPVCYLPFPVHTLWQTETEDEISGNKLVTTLRYAHGAWDGREREFRGFGYVEQTDSHQLAQGNAPERTPPALTKSWYATGLPAVDNALSAGYWRGDKQAFAGFTPRFTLWKEGKDVPLTPEDDHNLYWLNRALKGQPLRSELYGLDGSAQQQIPYTVTESRPQVRQLQDGATVSPVLWASVVESRSYHYERIISDPQCNQDITLSSDLFGQPLKQVSVQYPRRNKPTTNPYPDTLPDTLFASSYDDQQQLLRLTCRQSSWHHLIGNELRVLGLPDGTRSDAFTYDAKQVPVDGLNLETLCAENSLIADDKPREYLNQQRTFYTDGKNQTPLKTPTRQALIAFTETAVLTESLLSAFDGGITPDELPGILTQAGYQQEPYLFPRTGENKVWVARQGYTDYGTEAQFWRPVAQRNSLLTGKMTLKWDTHYCVITQTQDAAGLTVSANYDWRFLTPTQLTDINDNVHLITLDALGRPVTQRFWGIESGVATGYSSSEEKPFSPPNDIDTAINLTGPLPVAQCLVYAPDSWMPLFSQETFNTLTQEEQETLRDSRIITEDWRICALTRRRWLQSQKISTPLVKLLTNSIGLPPHNLTLTTDRYDRDSEQQIRQQVAFSDGFGRLLQASVRHEAGEAWQRNQDGSLVTKVENTKTRWAVTGRTEYDNKGQTIRTYQPYFLNDWRYVSDDSARKEAYADTHIYDPIGREIRVITAKGWLRQSQYFPWFTVSEDENDTAADALV

SEQ ID NO: 6 - protein, 1474 aa, Photorhabdus luminescens
MQNSQDFSITELSLPKGGGAITGMGEALTPTGPDGMAALSLPLPISAGRGYAPAFTLNYNSGAGNSPFGLGWDCNVMTIRRRTHFGVPHYDETDTFLGPEGEVLVVADQPRDESTLQGINLGATFTVTGYRSRLESHFSRLEYWQPKTTGKTDFWLIYSPDGQVHLLGKSPQARISNPSQTTQTAQWLLEASVSSRGEQIYYQYRAEDDTGCEADEITHHLQATAQRYLHIVYYGNRTASETLPGLDGSAPSQADWLFYLVFDYGERSNNLKTPPAFSTTGSWLCRQDRFSRYEYGFEIRTRRLCRQVLMYHHLQALDSKITEHNGPTLVSRLILNYDESAIASTLVFVRRVGHEQDGNVVTLPPLELAYQDFSPRHHAHWQPMDVLANFNAIQRWQLVDLKGEGLPGLLYQDKGAWWYRSAQRLGEIGSDAVTWEKMQPLSVIPSLQSNASLVDINGDGQLDWVITGPGLRGYHSQRPDGSWTRFTPLNALPVEYTHPRAQLADLMGAGLSDLVLIGPKSVRLYANTRDGFAKGKDVVQSGDITLPVPGADPRKLVAFSDVLGSGQAHLVEVSATKVTCWPNLGRGRFGQPITLPGFSQPATEFNPAQVYLADLDGSGPTDLIYVHTNRLDIFLNKSGNGFAEPVTLRFPEGLRFDHTCQLQMADVQGLGVASLILSVPHMSPHHWRCDLTNMKPWLLNEMNNNMGVHHTLRYRSSSQFWLDEKAAALTTGQTPVCYLPFPIHTLWQTETEDEISGNKLVTTLRYARGAWDGREREFRGFGYVEQTDSHQLAQGNAPERTPPALTKNWYATGLPVIDNALSTEYWRDDQAFAGFSPRFTTWQDNKDVPLTPEDDNSRYWFNRALKGQLLRSELYGLDDSTNKHVPYTVTEFRSQVRRLQHTDSRYPVLWSSVVESRNYHYERIASDPQCSQNITLSSDRFGQPLKQLSVQYPRRQQPAINLYPDTLPDKLLANSYDDQQRQLRLTYQQSSWHHLTNNTVRVLGLPDSTRSDIFTYGAENVPAGGLNLELLSDKNSLIADDKPREYLGQQKTAYTDGQNTTPLQTPTRQALIAFTETTVFNQSTLSAFNGSIPSDKLSTTLEQAGYQQTNYLFPRTGEDKVWVAHHGYTDYGTAAQFWRPQKQSNTQLTGKITLIWDANYCVVVQTRDAAGLTTSAKYDWRFLTPVQLTDINDNQHLITLDALGRPITLRFWGTENGKMTGYSSPEKASFSPPSDVNAAIELKKPLPVAQCQVYAPESWMPVLSQKTFNRLAEQDWQKLYNARIITEDGRICTLAYRRWVQSQKAIPQLISLLNNGPRLPPHSLTLTTDRYDHDPEQQIRQQVVFSDGFGRLLQAAARHEAGMARQRNEDGSLIINVQHTENRWAVTGRTEYDNKGQPIRTYQPYFLNDWRYVSNDSARQEKEAYADTHVYDPIGREIKVITAKGWFRRTLFTPWFTVNEDENDTAAEVKKVKM

SEQ ID NO: 7 - protein, 1485 aa, Photorhabdus luminescens strain W14
MQDSPEVSITTLSLPKGGGAINGMGEALNAAGPDGMASLSLPLPLSTGRGTAPGLSLIYSNSAGNGPFGIGWQCGVMSISRRTQHGIPQYGNDDTFLSPQGEVMNIALNDQGQPDIRQDVKTLQGVTLPISYTVTRYQARQILDFSKIEYWQPASGQEGRAFWLISSPDGQLHILGKTAQACLANPQNDQQIAQWLLEETVTPAGEHVSYQYRAEDEAHCDDNEKTAHPNVTAQRYLVQVNYGNIKPQASLFVLDNAPPAPEEWLFHLVFDHGERDTSLHTVPTWDAGTAQWSVRPDIFSRYEYGFEVRTRRLCQQVLMFHRTALMAGEASTNDAPELVGRLILEYDKNASVTTLITIRQLSHESDGSPVTQPPLELAWQRFDLEKMPTWQRFDALDNFNSQQRYQLVDLRGEGLPGMLYQDRGAWWYKAPQRQEDGDSNAVTYDKIAPLPTLPNLQDNASLMDINGDGQLDWVVTASGIRGYHSQQPDGKWTHFTPINALPVEYFHPSIQFADLTGAGLSDLVLIGPKSVRLYANQRNGWRKGEDVPQSTGITLPVTGTDARKLVAFSDMLGSGQQHLVEIKANRVTCWPNLGHGRFGQPLTLSGFSQPENSFNPERLFLADIDGSGTTDLIYAQSGSLLIYLNQSGNQFDAPLTLALPEGVQFDNTCQLQVADIQGLGIASLILTVPHIAPHHWRCDLSLTKPWLLNVMNNNRGAHHTLHYRSSAQFWLDEKLQLTKAGKSPACYLPFPMHLLWYTEIQDEISGNRLTSEVNYSHGVWDGKEREFRGFGCIKQTDTTTFSHGTAPEQAAPSLSISWFATGMDEVDSQLATEYWQADTQAYSGFETRYTVWDHTNQTDQAFTPNETQRNWLTRALKGQLLRTELYGLDGTDKQTVPYTVSESRYQVRSIPVNKETELSAWVTAIENRSYHYERIITDPQFSQSIKLQHDIFGQSLQSVDIAWPRREKPAVNPYPPTLPETLFDSSYDDQQQLLRLVRQKNSWHHLTDGENWRLGLPNAQRRDVYTYDRSKIPTEGISLEILLKDDGLLADEKAAVYLGQQQTFYTAGQAEVTLEKPTLQALVAFQETAMMDDTSLQAYEGVIEEQELNTALTQAGYQQVARLFNTRSESPVWAARQGYTDYGDAAQFWRPQAQRNSLLTGKTTLTWDTHHCVIIQTQDAAGLTTQAHYDYRFLTPVQLTDINDNQHIVTLDALGRVTTSRFWGTEAGQAAGYSNQPFTPPDSVDKALALTGALPVAQCLVYAVDSWMPSLSLSQLSQSQEEAEALWAQLRAAHMITEDGKVCALSGKRGTSHQNLTIQLISLLASIPRLPPHVLGITTDRYDSDPQQQHQQTVSFSDGFGRLLQSSARHESGDAWQRKEDGGLVVDANGVLVSAPTDTRWAVSGRTEYDDKGQPVRTYQPYFLNDWRYVSDDSARDDLFADTHLYDPLGREYKVITAKKYLREKLYTPWFIVSEDENDTASRTP

SEQ ID NO: 8 - protein, 1493 aa, Xenorhabdus nematophilus
MQGSTPLKLEIPSLPSGGGSLKGMGEALNAVGAEGGASFSLPLPISVGRGLVPVLSLNYSSTAGNGSFGMGWQCGVGFISLRTAKGVPHYTGQDEYLGPDGEVLSIVPDSQGQPEQRTATSLLGTVLTQPHTVTRYQSRVAEKIVRLEHWQPQQRREEETSFWVLFTADGLVHLFGKHHHARIADPQDETRIARWLMEETVTHTGEHIYYHYRAEDDLDCDEHELAQHSGVTAQRYLAKVSYGNTQPETAFFAVKSGIPADNDWLFHLVFDYGERSSSLNSVPEFNVSENNVSENNVPEKWRCRPDSFSRYEYGFEIRTRRLCRQVLMFHQLKALAGEKVAEETPALVSRLILDYDLNNKVSLLQTARRLAHETDGTPVMMSPLEMDYQRVNHGVNLNWQSMPQLEKMNTLQPYQLVDLYGEGISGVLYQDTQKAWWYRAPVRDITAEGTNAVTYEEAKPLPHIPAQQESAMLLDINGDGRLDWVITASGLRGYHTMSPEGEWTPFIPLSAVPMEYFHPQAKLADIDGAGLPDLALIGPNSVRVWSNNRAGWDRAQDVIHLSDMPLPVPGRNERHLVAFSDMTGSGQSHLVEVTADSVRYWPNLGHGKFGEPLMMTGFQISGETFNPDRLYMVDIDGSGTTDFIYARNTYLELYANESGNHFAEPQRIDLPDGVRFDDTCRLQIADTQGLGTASIILTIPHMKVQHWRLDMTIFKPWLLNAVNNNMGTETTLYYRSSAQFWLDEKLQASESGMTVVSYLPFPVHVLWRTEVLDEISGNRLTSHYHYSHGAWDGLEREFRGFGRVTQTDIDSRASATQGTHAEPPAPSRTVNWYGTGVREVDILLPTEYWQGDQQAFPHFTPRFTRYDEKSGGDMTVTPSEQEEYWLHRALKGQRLRSELYGDDDSILAGTPYSVDESRTQVRLLPVMVSDVPAVLVSVAESRQYRYERVATDPQCSQKIVLKSDALGFPQDNLEIAYSRRPQPEFSPYPDTLPETLFTSSFDEQQMFLRLTRQRSSYHHLNHDDNTWITGLMDTSRSDARIYQADKVPDGGFSLEWFSATGAGALLLPDAAADYLGHQRVAYTGPEEQPAIPPLVAYIETAEFDERSLAAFEEVMDEQELTKQLNDAGWNTAKVPFSEKTDFHVWVGQKEFTEYAGADGFYRPLVQRETKLTGKTTVTWDSHYCVITATEDAAGLRMQAHYDYRFMVADNTTDVNDNYHTVTFDALGRVTSFRFWGTENGEKQGYTPAENETVPFIVPTTVDDALALKPGIPVAGLMVYAPLSWMVQASFSNDGELYGELKPAGIITEDGYLLSLAFRRWQQNNPAAAMPKQVNSQNPPHVLSVITDRYDADPEQQLRQTFTFSDGFGRTLQTAVRHESGEAWVRDEYGAIVAENHGAPETAMTDFRWAVSGRTEYDGKGQALRKYQPYFLNSWQYVSDDSARQDIYADTHYYDPLGREYQVITAKGGFRRSLFTPWFVVNEDENDTAGEMTA

SEQ ID NO: 9 - protein, 1506 aa, Xenorhabdus bovienii
MKQDSQDMTVTQLSLPKGGGAISGMGDTISNAGPDGMASLSVPLPISAGRGGAPNLSLNYSSGAGNGSFGIGWQSSTMAISRRTQHGVPQYHGEDTFLCPMGEVMAVAVNQSGQPDVRKTDKLLGGQLPVTYTVTRHQPRNIQHFSKLEYWQPPTDVETTPFWLMYSPDGQIHIFGKTEQAQIANPAEVSQIAQWLLEETVTPAGEHIYYQYRAEDDIGCDDSEKNAHPNASAQRYLTQVNYGNITPESSLLVLKNTPPADNEWLFHLVFDYGERAQEINTVPPFKAPSNNWKIRPDRFSRFEYGFEVRTRRLCQQILMFHRLKSLAGEQIDGEEIPALVARLLLSYDLNDSVTTLTAIRQMAYETDATLIALPPLEFDYQPFEAKVTQKWQEMPQLAGLNAQQPYQLVDLYGEGISGILYQDRPGAWWYQAPIRQKNVEDINAVTYSPINPLPKIPSQQDRATLMDIDGDGHLDWVIAGAGIQGRYSMQPNGEWTHFIPISALPTEYFHPQAQLADLVGAGLSDLALIGPRSVRLYANDRGNWKAGINVMPPDGVNLPIFGGDASSLVAFSDMLGSGQQHLVEIAAQSVKCWPNLGHGRFGAAILLPGFSQPNGTFNANQVFLADIDGSGTADIIYAHSTYLDIYLNESGNRFSAPVRLNLPEGVMFDNTCQLQVSDIQGLGAASIVLTVPHMTPRHWRYDFTHNKPWLLNVINNNRGAETTLFYRSSAQFWLDEKSQIEELGKFAASYLPFPIHLLWRNEALDEITGNRLTKVMNYAHGAWDGREREFCGFGRVTQIDTDEFAKGTTEKAPDENIYPSRSISWFATGLPEVDSQLPAEYWRGDDQAFAGFTPRFTRYEKGNAGQEGQDTPIKEPTETEAYWLNRAMKGQLLRSEVYGDDKTEKAKIPYTVTEARCQVRLIPSNDEAAPSSWTSIIENRSYHYERIVVDPSCKQQVVLKADEYGFPLAKVDIAYPRRNKPAQNPYPDSLPDTLFADSYDDQQKQLYLTKQQQSYYHLTQQDDWVLGLTDSRYSEVYHYAQTDAQSDIPKAGLILEDLLKVDGLIGKDKTFIYLGQQRVAYVGGDAEKPTRQVRVAYTETAAFDDNALHAFDGVIAPDELTQQLLAGGYLLVPQISDVAGSSEKVWVARQGYTEYGSAAQFYRPLIQRKSLLTGKYTLSWDTHYCVVVKTEDGAGMTTQAKYDYRFLLPAQLTDINDNQHIVTFNALGQVTSSRFWGTENGKISGYSTPESKPFTVPDTVEKALALQPTIPVSQCNIYVPDSWMRLLPQQSLTGQLKEGETLWNALHRAGVVTEDGLICELAYRRWIKRQATSSMMAVTLQQILAQTPRQPPHAMTITTDRYDSDSQQQLRQSIVLSDGFGRVLQSAQRHEAGEAWQRAEDGSLVVDNTGKPVVANTTTRWAVSGRTEYDGKGQAIRAYLPYYLNDWRYVSDDSARDDLYADTHFYDPLGREYQVKTAKGFWRENMFMPWFVVNEDENDTAARLTS

SEQ ID NO: 10 - protein, 1444 aa, Paenibacillus strain DAS1529
MPQSSNADIKLLSPSLPKGGGSMKGIEENIAAPGSDGMARCNVPLPVTSGRYITPDISLSYASGHGNGAYGMGWTMGVMSISRRTSRGTPSYTSEDQFLGPDGEVLVPESNEQGEIITRHTDTAQGIPLGETFTVTRYFPRIESAFHLLEYWEAQAGSATASFWLIHSADGVLHCLGKTAQARIAAPDDSAKIAEWLVEESVSPFGEHIYYQYKEEDNQGVNLEEDNHQYGANRYLKSIRYGNKVASPSLYVWKGEIPADGQWLYSVILDYGENDTSADVPPLYTPQGEWLVRPDRFSRYDYGFEVRTCRLCRQVLMFHVFKELGGEPALVWRMQLEYDENPAASMLSAVRQLAYEADGAIRSLPPLEFDYTPFGIETTADWQPFLPVPEWADEEHYQLVDLYGEGIPGLLYQNNDHWHYRSPARGDTPDGIAYNSWRPLPHIPVNSRNGMLMDLNGDGYLEWLLAEPGVAGRYSMNPDKSWSGFVPLQALPTEFFHPQAQLANVTGSGLTDLVMIGPKSVRFYAGEEAGFKRACEVWQQVGITLPVERVDKKELVAFSDMLGSGQSHLVRIRHDGVTCWPNLGNGVFGAPLALHGFTASEREFNPERVYLVDLDGSGASDIIYASRDALLIYRNLSGNGFADPVRVPLPDGVRFDNLCRLLPADIRGLGVASLVLHVPYMAPRSWKLDFFAAKPYLLQTVSNNLGASSSFWYRSSTQYWLDEKQAASSAVSALPFPINVVSDMHTVDEISGRTRTQKYTYRHGVYDRTEKEFAGFGRIDTWEEERDSEGTLSVSTPPVLTRTWYHTGQKQDEERAVQQYWQGDPAAFQVKPVRLTRFDAAAAQDLPLDSNNGQQEYWLYRSLQGMPLRTEIFAGDVGGSPPYQVESFRYQVRLVQSIDSECVALPMQLEQLTYNYEQIASDPQCSQQIQQWFDEYGVAAQSVTIQYPRRAQPEDNPYPRTLPDTSWSSSYDSQQMLLRLTRQRQKAYHLADPEGWRLNIPHQTRLDAFIYSADSVPAEGISAELLEVDGTLRSSALEQAYGGQSEIIYAGGGEPDLRALVHYTRSAVLDEDCLQAYEGVLSDSQLNSLLASSGYQRSARILGSGDEVDIFVAEQGFTRYADEPNFFRILGQQSSLLSGEQVLTWDDNFCAVTSIEDALGNQIQIAYDYRFVEAIQITDTNNNVNQVALDALGRVVYSRTWGTEEGIKTGFRPEVEFATPETMEQALALASPLPVASCCVYDAHSWMGTITLAQLSELVPDSEKQWSFLIDNRLIMPDGRIRSRGRDPWSLHRLLPPAVGELLSEADRKPPHTVILAADRYPDDPSQQIQASIVFSDGFGRTIQTAKREDTRWAIAERVDYDGTGAVIRSFQPFYLDDWNYVGEEAVSSSMYATIYYYDALARQLRMVNAKGYERRTAFYPWFTVNEDENDTMDSSLFASPPAR

SEQ ID NO: 11 - protein, 1428 aa, Serratia entomophila
MQNHQDMAITAPTLPSGGGAVTGLKGDIAAAGPDGAATLSIPLPVSPGRGYAPTGALNYHSRSGNGPFGIGWGIGGAAVQRRTRNGAPTYDDTDEFTGPDGEVLVPALTAAGTQEARQATSLLGINPGGSFNVQVYRSRTEGSLSRLERWLPADETETEFWVLYTPDGQVALLGRNAQARISNPTAPTQTAVWLMESSVSLTGEQMYYQYRAEDDDGCDEAERDAHPQAGAQRYPVAVWYGNRQAARTLPALVSTPSMDSWLFILVFDYGERSSVLSEAPAWQTPGSGEWLCRQDCFSGYEFGFNLRTRRLCRQVLMFHYLGVLAGSSGANDAPALISRLLLDYRESPSLSLLENVHQVAYESDGTSCALPALALGWQTFTPPTLSAWQTRDDMGKLSLLQPYQLVDLNGEGVVGILYQDSGAWWYREPVRQSGDDPDAVTWGAAAALPTMPALHNSGILADLNGDGRLEWVVTAPGVAGMYDRTPGRDWLHFTPLSALPVEYAHPKAVLADILGAGLTDMVLIGPRSVRLYSGKNDGWNKGETVQQTERLTLPVPGVDPRTLVAFSDMAGSGQQHLTEVRANGVRYWPNLGHGRFGQPVNIPGFSQSVTTFNPDQILLADTDGSGTTDLIYAMSDRLVIYFNQSGNYFAEPHTLLLPKGVRYDRTCSLQVADIQGLGVPSLLLTVPHVAPHHWVCHLSADKPWLLNGMNNNMGARHALHYRSSVQFWLDEKAEALAAGSSPACYLPFTLHTLWRSVVQDEITGNRLVSDVLYRHGVWDGQEREFRGFGFVEIRDTDTLASQGTATELSMPSVSRNWYATGVPAVDERLPETYWQNDAAAFADFATRFTVGSGEDEQTYTPDDSKTFWLQRALKGILLRSELYGADGSSQADIPYSVTESRPQVRLVEANGDYPVVWPMGAESRTSVYERYHNDPQCQQQAVLLSDEYGFPLRQVSVNYPRRPPSADNPYPASLPATLFANSYDEQQQILRLGLQQSSAHHLVSLSEGHWLLGLAEASRDDVFTYSADNVPEGGLTLEHLLAPESLVSDSQVGTLAGQQQVWYLDSQDVATVAAPPLPPKVAFIETAVLDEGMVSSLAAYIVDEHLEQAGYRQSGYLFPRGREAEQALWTQCQGYVTYAGAEHFWLPLSFRDSMLTGPVTVTRDAYDCVITQWQDAAGIVTTADYDWRFLTPVRVTDPNDNLQSVTLDALGRVTTLRFWGTENGIATGYSDATLSVPDGAAAALALTAPLPVAQCLVYVTDSWGDDDNEKMPPHVVVLATDRYDSDTGQQVRQQVTFSDGFGRELQSATRQAEGNAWQRGRDGKLVTASDGLPVTVATNFRWAVTGRAEYDNKGLPVRVYQPYFLDSWQYVSDDSARQDLYADTHFYDPTAREWQVITAKGERRQVLYTPWFVVSEDENDTVGLNDAS

SEQ ID NO: 12 - protein, 1043 aa, Photorhabdus luminescens
MSPSETTLYTQTPTVSVLDNRGLSIRDIGFHRIVIGGDTDTRVTRHQYDARGHLNYSIDPRLYDAKQADNSVKPNFVWQHDLAGHALRTESVDAGRTVALNDIEGRSVMTMNATGVRQTRRYEGNTLPGRLLSVSEQVFNQESAKVTERFIWAGNTTSEKEYNLSGLCIRHYDTAGVTRLMSQSLAGAMLSQSHQLLAEGQEANWSGDDETVWQGMLASEVYTTQSTTNAIGALLTQTDAKGNIQRLAYDIAGQLKGSWLTVKGQSEQVIVKSLSWSAAGHKLREEHGNGVVTEYSYEPETQRLIGITTRRAEGSQSGARVLQDLRYKYDPVGNVISIHNDAEATRFWRNQKVEPENRYVYDSLYQLMSATGREMANIGQQSNQLPSPVIPVPTDDSTYTNYLRTYTYDRGGNLVQIRHSSPATQNSYTTDITVSSRSNRAVLSTLTTDPTRVDALFDSGGHQKMLIPGQNLDWNIRGELQRVTPVSRENSSDSEWYRYSSDGMRLLKVSEQQTGNSTQVQRVTYLPGLELRTTGVADKTTEDLQVITVGEAGRAQVRVLHWESGKPTDIDNNQVRYSYDNLLGSSQLELDSEGQILSQEEYYPYGGTAIWAARNQTEASYKFIRYSGKERDATGLYYYGYRYYQPWVGRWLSADPAGTVDGLNLYRMVRNNPITLTDHDGLAPSPNRNRNTFWFASFLFRKPDEGMSASMRRGQKIGRAIAGGIAIGGLAATIAATAGAAIPVILGVAAVGAGIGALMGYNVGSLLEKGGALLARLVQGKSTLVQSAAGAAAGASSAAAYGARAQGVGVASAAGAVTGAVGSWINNADRGIGGAIGAGSAVGTIDTMLGTASTLTHEVGAAAGGAAGGMITGTQGSTRAGIHAGIGTYYGSWIGFGLDVASNPAGHLANYAVGYAAGLGAEMAVNRIMGGGFLSRLLGRVVSPYAAGLARQLVHFSVARPVFEPIFSVLGGLVGGIGTGLHRVMGRESWISRALSAAGSGIDHVAGMIGNQIRGRVLTTTGIANAIDYGTSAVGAARRVFSL

SEQ ID NO: 13 - protein, 915 aa, Photorhabdus luminescens
MSSYNSAIDQKTPSIKVLDNRKLNVRTLEYLRTQADENSDELITFYEFNIPGFQVKSTDPRKNKNQSGPNFIRVFNLAGQVLREESVDAGRTITLNDIESRPVLIINATGVRQNHRYEDNTLPGRLLAITEQVQAGEKTTERLIWAGNTPQEKDYNLAGQCVRHYDTAGLTQLNSLSLAGVVLSQSQQLLTDNQDADWTGEDQSLWQQKLSSDVYITQSNTDATGALLTQTDAKGNIQRLAYDVAGQLKGSWLTLKGQAEQVIIKSLTYSAAGQKLREEHGNGIVTEYSYEPETQRLIGITTRRPSDAKVLQDLRYQYDPVGNVINIRNDAEATRFWRNQKVAPENSYTYDSLYQLISATGREMANIGQQNNQLPSPALPSDNNTYTNYTRSYSYDHSGNLTQIRHSSPATQNNYTVAITLSNRSNRGVLSTLTTDPNQVDTLFDAGGHQTSLLPGQTLIWTPRGELKQVNNGPGNEWYRYDSNGMRQLKVSEQPTQNTTQQQRVIYLPGLELRTTQSNATTTEELHVITLGEAGRAQVRVLHWESGKPEDVNNNQLRYSYDNLIGSSQLELDNQGQIISEEEYYPFGGTALWAANSQTEASYKTIRYSGKERDATGLYYYGYRYYQPWAGRWLSADPAGTIDGLNLYRMVRNNPVSLQDENGLAPEKGKYTKEVNFFDELKFKLAAKSSHVVKWNEKESSYTKNKSLKVVRVGDSDPSGYLLSHEELLKGIEKSQIIYSRLEENSSLSEKSKTNLSLGSEISGYMARTIQDTISEYAEEHKYRSNHPDFYSETDFFALMDKSEKNDYSGERKIYAAMEVKVYHDLKNKQSELHVNYALAHPYTQLSNEERALLQETEPAIAIDREYNFKGVGKFLTMKAIKKSLKGHKINRISTEAINIRSAAIAENLGMRRTS

SEQ ID NO: 14 - protein, 960 aa, Photorhabdus luminescens
MKNIDPKLYQKTPTVSVYDNRGLIIRNIDFHRTTANGDPDTRITRHQYDIHGHLNQSIDPRLYEAKQTNNTIKPNFLWQYDLTGNPLCTESIDAGRTVTLNDIEGRPLLTVTATGVIQTRQYETSSLPGRLLSVAEQTPEEKTSRITERLIWAGNTEAEKDHNLAGQCVRHYDTAGVTRLESLSLTGTVLSQSSQLLIDTQEANWTGDNETVWQNMLADDIYTTLSTFDATGALLTQTDAKGNIQRLAYDVAGQLNGSWLTLKGQTEQVIIKSLTYSAAGQKLREEHGNDVITEYSYEPETQRLIGIKTRRPSDTKVLQDLRYEYDPVGNVISIRNDAEATRFWHNQKVMPENTYTYDSLYQLISATGREMANIGQQSHQFPSPALPSDNNTYTNYTRTYTYDRGGNLTKIQHSSPATQNNYTTNITVSNRSNRAVLSTLTEDPAQVDALFDAGGHQNTLISGQNLNWNTRGELQQVTLVKRDKGANDDREWYRYSGDGRRMLKINEQQASNNAQTQRVTYLPNLELRLTQNSTATTEDLQVITVGEAGRAQVRVLHWESGKPEDIDNNQLRYSYDNLIGSSQLELDSEGQIISEEEYYPYGGTALWAARNQTEASYKTIRYSGKERDATGLYYYGYRYYQPWIGRWLSSDPAGTIDGLNLYRMVRNNPVTLLDPDGLMPTIAERIAALKKNKVTDSAPSPANATNVAINIRPPVAPKPSLPKASTSSQPTTHPIGAANIKPTTSGSSIVAPLSPVGNKSTSEISLPESAQSSSSSTTSTNLQKKSFTLYRADNRSFEEMQSKFPEGFKAWTPLDTKMARQFASIFIGQKDTSNLPKETVKNISTWGAKPKLKDLSNYIKYTKDKSTVWVSTAINTEAGGQSSGAPLHKIDMDLYEFAIDGQKLNPLPEGRTKNMVPSLLLDTPQIETSSIIALNHGPVNDAEISFLTTIPLKNVKPHKR

SEQ ID NO: 15 - protein, 949 aa, Photorhabdus luminescens
MKNIDPKLYQHTPTVNVYDNRGLTIRNIDFHRDVAGGDTDTRITRHQYDTRGHLSQSIDPRLYDAKQTNNSTNPNFLWQYNLTGDTLRTESVDAGRTVALNDIEGRQVLIVTATGAIQTRQYEANTLPGRLLSVSEQAPGEQTPRVTEHFIWAGNTQAEKDHNLAGQYVRHYDTAGVTQLESLSLTENILSQSRQLLADGQEADWTGNDETLWQTKLNSETYTTQSTFDATGALLTQTDAKGNMQRLAYNVAGQLQGSWLTLKNQSEQVIVKSLTYSAAGQKLREEHGNGVITEYSYEPETLRLIGTTTRRQSDSKVLQDLRYEHDPVGNIISVRNDAEATRFWRNQKIVPENTYTYDSLYQLISATGREMANIGQQSNQLPSPIIPLPTDENSYTNYTRSYNYDRGGNLVQIRHSSPAAQNNYTTDITVSNRSNRAVLSSLTSDPTQVEALFDAGGHQTKLLPGQELSWNTRGELKQVTPVSRESASDREWYRYGNDGMRRLKVSEQQTGNSTQQQRVTYLPDLELRTTQNGTTTSEDLHAITVGAAGHAQVRVLHWETTPPAGINNNQLRYSYDNLIGSSQLELDNAGQIISQEEYYPFGGTALWAARNQIEASYKILRYSGKERDATGLYYYGYRYYQPWVGRWLSADPAGTIDGLNLYRMVRNNPSTLVDISGLAPTKYNIPGFDFDVEIDEQKRSKLKPTLIRIKDEFLHYGPVDKLLEEKKPGLNVPEELFDRGPSENGVSTLTFKKDLPISCISNTEYTLDILYNKHETKPFPYENEATVGADLGVIMSVEFGNKSIGNASDEDLKEEHLPLGKSTMDKTDLPDLKQGLMIAEKIKSGKGAYPFHFGAAIAVVYGEDKKVAASILTDLSEPKRDEGEYLQSTRKVSAMFITNVNEFRGHDYPKSKYSIGLVTAEKRQPVISKKRANPEEAPSSSRNKKLHVH

SEQ ID NO: 16 - protein, 938 aa, Photorhabdus luminescens strain W14
MENIDPKLYHHTPTVSVHDNRGLAIRNISFHRTTAEANTDTRITRHQYNAGGYLNQSIDPRLYDAKQTNNAVQPNFIWRHNLTGNILRTESVDAGRTITLNDIEGRPVLTINAAGVRQNHRYEDNTLPGRLLAISEQGQAEEKTTERLIWAGNTPQEKDHNLAGQCVRHYDTAGLTQLNSLALTGAVLSQSQQLLTDNQDADWTGEDQSLWQQKLSSDVYITQSNTDATGALLTQTDAKGNIQRLAYDVAGQLKGSWLTLKGQAEQVIIKSLTYSAAGQKLREEHGNGIVTEYSYEPETQRLIGITTRRPSDAKVLQDLRYQYDPVGNVISIRNDAEATRFWRNQKVAPENSYTYDSLYQLISATGREMANIGQQSNQLPSPALPSDNNTYTNYTRTYTYDRGGNLTKIQHSSPAAQNNYTTDITVSNRSNRAVLSTLTADPTQVDALFDAGGHQTSLLSGQVLTWTPRGELKQANNSAGNEWYRYDSNGIRQLKVNEQQTQNIPQQQRVTYLPGLEIRTTQNNATTTEELHVITLGKAGRAQVRVLHWESGKPEDINNNQLRYSYDNLIGSSQLQLDSDGQIISEEEYYPFGGTALWAARNQTEASYKTIRYSGKERDVTGLYYYGYRYYQPWAGRWLGADPAGTIDGLNLYRMVRNNPVTQFDVQGLSPANRTEEAIIKQGSFTGMEEAVYKKMAKPQTFKRQRAIAAQTEQEAHESLTNNPSVDISPIKNYTTDSSQINAAIRENRITPAVESLDATLSSLQDRQMRVTYRVMTYVDNSTPSPWHSPQEGNSINVGDIVSDNAYLSTSAHRGFLNFVHKKETSETRYVKMAFLTNAGVNVPAASMYNNAGEEQVFKMDLNDSRKSLAEKLKLRVSGPQSGQAEILLPRETQFEVVSMKHQGRDTYVLLQDINQSAATHRNVRNTYTGNFKSSSAN

SEQ ID NO: 17 - protein, 1016 aa, Xenorhabdus nematophilus
MKNFVHSNTPSVTVLDNRGQTVREIAWYRHPDTPQVTDERITGYQYDAQGSLTQSIDPRFYERQQTASDKNAITPNLILLSSLSKKALRTQSVDAGTRVALHDVAGRPVLAVSANGVSRTFQYESDNLPGRLLTITEQVKGENACITERLIWSGNTPAEKGNNLAGQCVVHYDPTGMNQTNSISLTSIPLSITQQLLKDDSEADWHGMDESGWKNALAPESFTSVSTTDATGTVLTSTDAAGNKQRIAYDVAGLLQGSWLALKGKQEQVIVKSLTYSAASQKLREEHGNGIVTTYTYEPETQRVIGIKTERPSGHAAGEKILQNLRYEYDPVGNVLKSTNDAEITRFWRNQKIVPENTYTYDSLYQLVSVTGREMANIGRQKNQLPIPALIDNNTYTNYSRTYDYDRGGNLTRIRHNSPITGNNYTTNMTVSDHSNRAVLEELAQDPTQVDMLFTPGGHQTRLVPGQDLFWTPRDELQQVILVNRENTTPDQEFYRYDADSQRVIKTHIQKTGNSEQIQRTLYLPELEWRTTYSGNTLKEFLQVITVGESGQAQVRVLHWETGKPADISNDQLRYSYGNLIGSSGLELDSDGQIISQEEYYPYGGTAVWAARSQSEADYKTVRYSGKERDATGLYYYGYRYYQSWTGRWLSVDPAGEVDGLNLFRMCRNNPIVFSDSDGRFPGQGVLAWIGKKAYRKAVNITTEHLLEQGASFDTFLKLNRGLRTFVLGVGVASLGVKAATIAGASPWGIVGAAIGGFVSGAVMGFFANNISEKIGEVLSYLTRKRSVPVQVGAFVVTSLVTSALFNSSSTGTAISAATAVTVGGLMALAGEHNTGMAISIATPAGQGTLDTLRPGNVSAPERLGALSGAIIGGILLGRHQGSSELGERAAIGAMYGARWGRIIGNLWDGPYRFIGRLLLRRGISSAISHAVSSRSWFGRMIGESVGRNISEVLLPYSRTPGEWVGAAIGGTAAAAHHAVGGEVANAASRVTWSGFKRAFNNFFFNASARHNESEA

SEQ ID NO: 18 - protein, 962 aa, Xenorhabdus bovienii
MNVFNPTLYAGTPTVTVMDNRGLSVRDIAYHRTTAGEQADTRITRHQYSPHNFLIESIDPRLFDLQSQSTIKPNFTYCPALKGDVLRTESVDAGQTVILSDIEGRPLLNISAMGVVKHWQYEESTLPGRLLAVSERKNEASTPQIIERFIWSGNSPSEKDHNLAGKYLRHYDTAGLNQLNAVSLTSVDLSQSRQLLQDDVTADWSGSDESQWKTRLSNDIFTTEITADAVGNFLTQNDAKSNQQRLSYDVAGQLKASWLTIKGQNEQVIVNSLTYSAAGQKLREEQGNGVVTEYSYEAQTWRLIGVTAYRQSDKKRLQDLVYNYDPVGNLLNIRNNAEATRFWRNQIVEPENHYAYDSLYQLISASGREIASIGQQGSRLPVPIIPLPANDDVYTRYTRTYHYDRGGNLCQIRHCAPATDNKYTTKITVSNRSNRAVWDTLTTDPAKVDTLFDHGGHQLQLQSGQTLCWNYRGELQQITKIQRDEKPADKERYRYGVGAARVVKISTQQAGGSSHVQRVVYLPGLELRTTQHDATLIEDLQVIIMGEAGRAQVRVLHWEIPPPDNLNNDSLRYSYDSLMGSSQLELDGAGQIITQEEYYPYGGTAIWAARNQTEANYKTIRYSGKERDATGLYYYGHRYYQPWLGRWLSADPAGTVDGLNLYRMVRNNPITYRDADGLAPIGDKISEGIYEPELRVGLERDDPNVRDYDRVYPDTAKTEMIEATATTIAPSQMLSAHAFASVPILTDLFNPQTARLSQKTTDIVLNTQGGGDLIFTGMNIKGKGKEFNALKIVDTYGGEMPDSKTAISAYWLPQGGYTDIPIHPTGIQKYLFTPAFSGCTLAVDKLNENTLRAYHVEGSKEDAQYNNLAVAAHGEGLVMAMEFPDYGFHTDKTGQRLRNTQGFAFMSYNQSQKKWEIHYQRQALTSNTGIMNVSAKNKIRLNAPSHVKNSSIKGTEIMTTHF

SEQ ID NO: 19 - protein, 953 aa, Paenibacillus strain DAS1529
MKMIPWTHHYLLHRLRGEMEVKPMNTTSIYRGTPTISVVDNRNLEIRILQYNRIAAEDPADECILRNTYTPLSYLGSSMDPRLFSQYQDDRGTPPNIRTMASLRGEALCSESVDAGRKAELFDIEGRPVWLIDANGTETTLEYDVLGRPTAVFEQQEGTDSPQCRERFIYGEKEADAQANNLRGQLVRHYDTAGRIQTDSISLAGLPLRQSRQLLKNWDEPGDWSMDEESAWASLLAAEAYDTSWRYDAQDRVLAQTDAKGNLQQLTYNDAGQPQAVSLKLQGQAEQRIWNRIEYNAAGQVDLAEAGNGIVTEYTYEESTQRLIRKKDSRGLSSGEREVLQDYRYEYDPVGNILSIYNEAEPVRYFRNQAVAPKRQYAYDALYQLVSSSGRESDALRQQTSLPPLITPIPLDDSQYVNYAEKYSYDQAGNLIKLSHNGASQYTTNVYVDKSSNRGIWRQGEDIPDIAASFDRAGNQQALFPGRPLEWDTRNQLSRVHMVVREGGDNDWEGYLYDSSGMRIVKRSTRKTQTTTQTDTTLYLPGLELRIRQTGDRVTEALQVITVDEGAGQVRVLHWEDGTEPGGIANDQYRYSLNDHLTSSLLEVDGQGQIISKEEFYPYGGTALWTARSEVEASYKTIRYSGKERDATGLYYYGHRYYMPWLGRWLNPDPAGMVDGLNLYRMVRNNPIGLMDPNGNAPINVADYSFVHGDLVYGLSKERGRYLKLFNPNFNMEKSDSPAMVIDQYNNNVALSITNQYKVEELMKFQKDPQKAARKIKVPEGNRLSRNENYPLWHDYINIGEAKAAFKASHIFQEVKGNYGKDYYHKLLLDRMIESPLLWKRGSKLGLEIAATNQRTKIHFVLDNLNIEQVVTKEGSGGQSITASELRYIYRNRERLNGRVIFYRNNERLDQAPWQENPDLWSKYQPGLRQSSSSRVKERGIGNFFRRFSMKRK

SEQ ID NO: 20 - protein, 930 aa, Paenibacillus strain DAS1529
MNTTSIYRGTPTISVVDNRNLEIRILQYNRIAAEDPADECILRNTYTPLSYLGSSMDPRLFSQYQDDRGTPPNIRTMASLRGEALCSESVDAGRKAELFDIEGRPVWLIDANGTETTLEYDVLGRPTAVFEQQEGTDSPQCRERFIYGEKEADAQANNLRGQLVRHYDTAGRIQTDSISLAGLPLRQSRQLLKNWDEPGDWSMDEESAWASLLAAEAYDTSWRYDAQDRVLAQTDAKGNLQQLTYNDAGQPQAVSLKLQGQAEQRIWNRIEYNAAGQVDLAEAGNGIVTEYTYEESTQRLIRKKDSRGLSSGEREVLQDYRYEYDPVGNILSIYNEAEPVRYFRNQAVAPKRQYAYDALYQLVSSSGRESDALRQQTSLPPLITPIPLDDSQYVNYAEKYSYDQAGNLIKLSHNGASQYTTNVYVDKSSNRGIWRQGEDIPDIAASFDRAGNQQALFPGRPLEWDTRNQLSRVHMVVREGGDNDWEGYLYDSSGMRIVKRSTRKTQTTTQTDTTLYLPGLELRIRQTGDRVTEALQVITVDEGAGQVRVLHWEDGTEPGGIANDQYRYSLNDHLTSSLLEVDGQGQIISKEEFYPYGGTALWTARSEVEASYKTIRYSGKERDATGLYYYGHRYYMPWLGRWLNPDPAGMVDGLNLYRMVRNNPIGLMDPNGNAPINVADYSFVHGDLVYGLSKERGRYLKLFNPNFNMEKSDSPAMVIDQYNNNVALSITNQYKVEELMKFQKDPQKAARKIKVPEGNRLSRNENYPLWHDYINIGEAKAAFKASHIFQEVKGNYGKDYYHKLLLDRMIESPLLWKRGSKLGLEIAATNQRTKIHFVLDNLNIEQVVTKEGSGGQSITASELRYIYRNRERLNGRVIFYRNNERLDQAPWQENPDLWSKYQPGLRQSSSSRVKERGIGNFFRRFSMKRK

SEQ ID NO: 21 - protein, 973 aa, Serratia entomophila
MSTSLFSSTPSVAVLDNRGLLVRELQYYRHPDTPEETDERITCHQHDERGSLSQSADPRLHAAGLTNFTYLNSLTGTVLQSVSADAGTSLELSDAAGRAFLAVTGAGTEDAVTRTWQYEDDTLPGRPLSITEQVTGEAAQITERFVYAGNTDAEKILNLAGQCVSHYDTAGLVQTDSIALSGVPLAVTRQLLPDAAGANWMGEDASAWNDLLDGETFFTQTHADATGAVLSITDAKGNLQRVAYDVAGLLSGSWLTLKDGTEQVIVASLTYSAAGKKLREEHGNGVVTSYIYEPETQRLTGIKTERPSGHVAGAKVLQDLRYTYDPVGNVLSVNNDAEETRFWRNQKVVPENTYIYDSLYQLVSATGREMANAGQQGNDLPSATAPLPTDSSAYTNYTRTYRYDRGGNLTQMRHSAPATNNNYTTDITVSDRSNRAVLSTLAEVPSDVDMLFSAGGHQKHLQPGQALVWTPRGELQKVTPVVRDGGADDSESYRYDAGSQRIIKTGTRQTGNNVQTQRVVYLPGLELRIMANGVTEKESLQVITVGEAGRAQVRVLHWEIGKPDDLDEDSVRYSYDNLVGSSQLELDREGYLISEEEFYPYGGTAVLTARSEVEADYKTIRYSGKERDATGLDYYGYRYYQPWAGRWLSTDPAGTVDGLNLFRMVRNNPVTLFDSNGRISTGQEARRLVGEAFVHPLHMPVFERISVERKISMSVREAGIYTISALGEGAAAKGHNILEKTIKPGSLKAIYGDKAESILGLAKRSGLVGRVGQWDASGVRGIYAHNRPGGEDLVYPVSLQNTSANEIVNAWIKFKIITPYTGDYDMHDIIKFSDGKGHVPTAESSEERGVKDLINKGVAEVDPSRPFEYTAMNVIRHGPQVNFVPYMWEHEHDKVVNDNGYLGVVASPGPFPVAMVHQGEWTVFDNSEELFNFYKSTNTPLPEHWSQDFMDRGKGIVATPRHAELLDKRRVMY

SEQ ID NO: 22 - protein, 2523 aa, Xenorhabdus nematophilus
MIKVNELLDKINRKRSGDTLLLTNISFMSFSEFRHRTSGTLTWRETDFLYQQAHQESKQNKLEELRILSRANPQLANTTNLNITPSTLNNSYNSWFYGRAHRFVKPGSIASIFSPAAYLTELYREAKDFHPDNSQYHLNKRRPDIASLALTQNNMDEEISTLSLSNELLLHNIQTLEKTDYNGVMKMLSTYRQTGMTPYHLPYESARQAILLQDKNLTAFSRNTDVAELMDPTSLLAIKTDISPELYQILVEEITPENSTELMKKNFGTDDVLIFKSYASLARYYDLSYDELSLFVNLSFGKKNTNQQYKNEQLITLVNDGNDTATARLIKRTRKDFYDSHLNYAELIPIKENEYKYNFSVKKTEPDHLDFRLQNGDKEYIYQDKNFVPIANTHYSIPIKLTTEQITNGITLRLWRVKPNPSDAINANAYFKMMEFPGDIFLLKLNKAIRLYKATGISPEDIWQVIESIYDDLTIDSNVLGKLFYVQYYMQHYNISVSDALVLCHSDISQYSTKQQPSHFTILFNTPLLNGQEFSADNTKLDLTPGESKNHFYLGIMKRAFRVNDTELYTLWKLANGGTNPEFMCSIENLSLLYRVRLLADIHHLTVNELSMLLSVSPYVNTKIALFSDTALTQLISFLFQCTQWLTTQKWSVSDVFLMTTDNYSTVLTPDIENLITTLSNGLSTLSLGDDELIRAAAPLIAASIQMDSAKTAETILLWINQIKPQGLTFDDFMIIAANRDRSENETSNMVAFCQVLGQLSLIVRNIGLSENELTLLVTKPEKFQSETTALQHDLPTLQALTRFHAVIMRCGSYATEILTALELGALTAEQLAVALKFDAQVVTQALQQTGLGVNTFTNWRTIDVTLQWLDVAATLGITPDGVAALIKLKYIGEPETPMPTFDDWQAASTLLQAGLNSQQSDQLQAWLDEATTTAASAYYIKNSAPQQIKSRDELYSYLLIDNQVSAQVKTTRVAEAIASIQLYVNRALNNVEGKVSKPVKTRQFFCDWETYNRRYSTWAGVSELAYYPENYIDPTIRIGQTGMMNNLLQQLSQSQLNIDTVEDSFKNYLTAFEDVANLQVISGYHDSINVNEGLTYLIGYSQTEPRIYYWRNVDHQKCQHGQFAANAWGEWKKIEIPINVWQENIRPVIYKSRLYLLWLEQKELKNESEDGKIDITDYILKLSHIRYDGSWSSPFNFNVTDKIENLINKKASIGMYCSSDYEKDVIIVYFHEKKDNYSFNSLPAREGMTINPDMTLSILTENDLDAIVKSTLSELDTRTEYKVNNQFATDYLAEYKESITTKNKLASFTGNIFDLSYISPGNGHINLTFNPSMEINFSKGNIYNDEVKYLLSMVEDETVILFDYDRHDEMLGKEEEVFHYGTLDFIISIDLKNAEYFRVLMHLRTKEKIPRKSEIGVGINYDYESNDAEFKLDTNIVLDWKDNTGVWHTICESFTNDVSIINNMGNIAALFLREDPCVYLCSIATDIKIASSMIEQIQDKNISFLLKNGSDILVELNAEDHVASKPSHESDPMVYDFNQVKVDIEGYDIPLVSEFIIKQPDGGYNDIVIESPIHIKLKSKDTSNVISLHKMPSGTQYMQIGPYRTRLNTLFSRKLAERANIGIDNVLSMETQNLPEPQLGEGFYATFKLPPYNKEEHGDERWFKIHIGNIDGNSARQPYYEGMLSDIETTVTLFVPYAKGYYIREGVRLGVGYKKIIYDKSWESAFFYFDETKNQFIFINDADHDSGMTQQGIVKNIKKYKGFIHVVVMKNNTEPMDFNGANAIYFWELFYYTPMMVFQRLLQEQNFTESTRWLRYIWNPAGYSVQGEMQDYYWNVRPLEEDTSWNANPLDSVDPDAVAQHDPMHYKVATFMKMLDLLITRGDSAYRQLERDTLNEAKMWYVQALTLLGDEPYFSLDNDWSEPRLEEAASQTMRHHYQHKMLQLRQRAALPTKRTANSLTALFLPQINKKLQGYWQTLTQRLYNLRHNLTIDGQPLSLSLYATPADPSMLLSAAITASQGGGDLPHAVMPMYRFPVILENAKWGVSQLIQFGNTLLSITERQDAEALAEILQTQGSELALQSIKMQDKVMAEIDADKLALQESRHGAQSRFDSFNTLYDEDVNAGEKQAMDLYLSSSVLSTSGTALHMAAAAADLVPNIYGFAVGGSRFGALFNASAIGIEISASATRIAADKISQSEIYRRRRQEWEIQRNNAEAEIKQIDAQLATLAVRREAAVLQKNYLETQQAQTQAQLAFLQSKFSNAALYNWLRGRLSAIYYQFYDLAVSLCLMAEQTYQYELNNAAAHFIKPGAWHGTYAGLLAGETLMLNLAQMEKSYLEKDERALEVTRTVSLAEVYAGLTENSFILKDKVTELVNAGEGSAGTTLNGLNVEGTQLQASLKLSDLNIATDYPDGLGNTRRIKQISVTLPALLGPYQDVRAILSYGGSTMMPRGCKAIAISHGMNDSGQFQMDFNDAKYLPFEGLPVADTGTLTLSFPGISGKQKSLLLSLSDIILHIRYTIRS

SEQ ID NO: 23 - protein, 2538 aa, Xenorhabdus nematophilus
MYSTAVLLNKISPTRDGQTMTLADLQYLSFSELRKIFDDQLSWGEARHLYHETIEQKKNNRLLEARIFTRANPQLSGAIRLGIERDSVSRSYDEMFGARSSSFVKPGSVASMFSPAGYLTELYREAKDLHFSSSAYHLDNRRPDLADLTLSQSNMDTEISTLTLSNELLLEHITRKTGGDSDALMESLSTYRQAIDTPYHQPYETIRQVIMTHDSTLSALSRNPEVMGQAEGASLLAILANISPELYNILTEEITEKNADALFAQNFSENITPENFASQSWIAKYYGLELSEVQKYLGMLQNGYSDSTSAYVDNISTGLVVNNESKLEAYKITRVKTDDYDKNINYFDLMYEGNNQFFIRANFKVSREFGATLRKNAGPSGIVGSLSGPLIANTNFKSNYLSNISDSEYKNGVKIYAYRYTSSTSATNQGGGIFTFESYPLTIFALKLNKAIRLCLTSGLSPNELQTIVRSDNAQGIINDSVLTKVFYTLFYSHRYALSFDDAQVLNGSVINQYADDDSVSHFNRLFNTPPLKGKIFEADGNTVSIDPDEEQSTFARSALMRGLGVNSGELYQLGKLAGVLDAQNTITLSVFVISSLYRLTLLARVHQLTVNELCMLYGLSPFNGKTTASLSSGELPRLVIWLYQVTQWLTEAEITTEAIWLLCTPEFSGNISPEISNLLNNLRPSISEDMAQSHNRELQAEILAPFIAATLHLASPDMARYILLWTDNLRPGGLDIAGFMTLVLKESLNANETTQLVQFCHVMAQLSLSVQTLRLSEAELSVLVISGFAVLGAKNQPAGQHNIDTLFSLYRFHQWINGLGNPGSDTLDMLRQQTLTADRLASVMGLDISMVTQAMVSAGVNQLQCWQDINTVLQWIDVASALHTMPSVIRTLVNIRYVTALNKAESNLPSWDEWQTLAENMEAGLSTQQAQTLADYTAERLSSVLCNWFLANIQPEGVSLHSRDDLYSYFLIDNQVSSAIKTTRLAEAIAGIQLYINRALNRIEPNARADVSTRQFFTDWTVNNRYSTWGGVSRLVYYPENYIDPTQRIGQTRMMDELLENISQSKLSRDTVEDAFKTYLTRFETVADLKVVSAYHDNVNSNTGLTWFVGQTRENLPEYYWRNVDISRMQAGELAANAWKEWTKIDTAVNPYKDAIRPVIFRERLHLIWVEKEEVAKNGTDPVETYDRFTLKLAFLRHDGSWSAPWSYDITTQVEAVTDKKPDTERLALAASGFQGEDTLLVFVYKTGKSYSDFGGSNKNVAGMTIYGDGSFKKMENTALSRYSQLKNTFDIIHTQGNDLVRKASYRFAQDFEVPASLNMGSAIGDDSLTVMENGNIPQITSKYSSDNLAITLHNAAFTVRYDGSGNVIRNKQISAMKLTGVDGKSQYGNAFIIANTVKHYGGYSDLGGPITVYNKTKNYIASVQGHLMNADYTRRLILTPVENNYYARLFEFPFSPNTILNTVFTVGSNKTSDFKKCSYAVDGNNSQGFQIFSSYQSSGWLDIDTGINNTDIKITVMAGSKTHTFTASDHIASLPANSFDAMPYTFKPLEIDASSLAFTNNIAPLDIVFETKAKDGRVLGKIKQTLSVKRVNYNPEDILFLRETHSGAQYMQLGVYRIRLNTLLASQLVSRANTGIDTILTMETQRLPEPPLGEGFFANFVLPKYDPAEHGDERWFKIHIGNVGGNTGRQPYYSGMLSDTSETSMTLFVPYAEGYYMHEGVRLGVGYQKITYDNTWESAFFYFDETKQQFVLINDADHDSGMTQQGIVKNIKKYKGFLNVSIATGYSAPMDFNSASALYYWELFYYTPMMCFQRLLQEKQFDEATQWINYVYNPAGYIVNGEIAPWIWNCRPLEETTSWNANPLDAIDPDAVAQNDPMHYKIATFMRLLDQLILRGDMAYRELTRDALNEAKMWYVRTLELLGDEPEDYGSQQWAAPSLSGAASQTVQAAYQQDLTMLGRGGVSKNLRTANSLVGLFLPEYNPALTDYWQTLRLRLFNLRHNLSIDGQPLSLAIYAEPTDPKALLTSMVQASQGGSAVLPGTLSLYRFPVMLERTRNLVAQLTQFGTSLLSMAEHDDADELTTLLLQQGMELATQSIRIQQRTVDEVDADIAVLAESRRSAQNRLEKYQQLYDEDINHGEQRAMSLLDAAAGQSLAGQVLSIAEGVADLVPNVFGLACGGSRWGAALRASASVMSLSATASQYSADKISRSEAYRRRRQEWEIQRDNADGEVKQMDAQLESLKIRREAAQMQVEYQETQQAHTQAQLELLQRKFTNKALYSWMRGKLSAIYYQFFDLTQSFCLMAQEALRRELTDNGVTFIRGGAWNGTTAGLMAGETLLLNLAEMEKVWLERDERALEVTRTVSLAQFYQALSSDNFNLTEKLTQFLREGKGNVGASGNELKLSNRQIEASVRLSDLKIFSDYPESLGNTRQLKQVSVTLPALVGPYEDIRAVLNYGGSIVMPRGCSAIALSHGVNDSGQFMLDFNDSRYLPFEGISVNDSGSLTLSFPDATDRQKALLESLSDIILHIRYTIRS

SEQ ID NO: 24 - protein, 2504 aa, Photorhabdus luminescens
MQNSLSSTIDTICQKLQLTCPAEIALYPFDTFREKTRGMVNWGEAKRIYEIAQAEQDRNLLHEKRIFAYANPLLKNAVRLGTRQMLGFIQGYSDLFGNRADNYAAPGSVASMFSPAAYLTELYREAKNLHDSSSIYYLDKRRPDLASLMLSQKNMDEEISTLALSNELCLAGIETKTGKSQDEVMDMLSTYRLSGETPYHHAYETVREIVHERDPGFRHLSQAPIVAAKLDPVTLLGISSHISPELYNLLIEEIPEKDEAALDTLYKTNFGDITTAQLMSPSYLARYYGVSPEDIAYVTTSLSHVGYSSDILVIPLVDGVGKMEVVRVTRTPSDNYTSQTNYIELYPQGGDNYLIKYNLSNSFGLDDFYLQYKDGSADWTEIAHNPYPDMVINQKYESQATIKRSDSDNILSIGLQRWHSGSYNFAAANFKIDQYSPKAFLLKMNKAIRLLKATGLSFATLERIVDSVNSTKSITVEVLNKVYRVKFYIDRYGISEETAAILANINISQQAVGNQLSQFEQLFNHPPLNGIRYEISEDNSKHLPNPDLNLKPDSTGDDQRKAVLKRAFQVNASELYQMLLITDRKEDGVIKNNLENLSDLYLVSLLAQIHNLTIAELNILLVICGYGDTNIYQITDDNLAKIVETLLWITQWLKTQKWTVTDLFLMTTATYSTTLTPEISNLTATLSSTLHGKESLIGEDLKRAMAPCFTSALHLTSQEVAYDLLLWIDQIQPAQITVDGFWEEVQTTPTSLKVITFAQVLAQLSLIYRRIGLSETELSLIVTQSSLLVAGKSILDHGLLTLMALEGFHTWVNGLGQHASLILAALKDGALTVTDVAQAMNKEESLLQMAANQVEKDLTKLTSWTQIDAILQWLQMSSALAVSPLDLAGMMALKYGIDHNYAAWQAAAAALMADHANQAQKKLDETFSKALCNYYINAVVDSAAGVRDRNGLYTYLLIDNQVSADVITSRIAEAIAGIQLYVNRALNRDEGQLASDVSTRQFFTDWERYNKRYSTWAGVSELVYYPENYVDPTQRIGQTKMMDALLQSINQSQLNADTVEDAFKTYLTSFEQVANLKVISAYHDNVNVDQGLTYFIGIDQAAPGTYYWRSVDHSKCENGKFAANAWGEWNKITCAVNPWKNIIRPVVYMSRLYLLWLEQQSKKSDDGKTTIYQYNLKLAHIRYDGSWNTPFTFDVTEKVKNYTSSTDAAESLGLYCTGYQGEDTLLVMFYSMQSSYSSYTDNNAPVTGLYIFADMSSDNMTNAQATNYWNNSYPQFDTVMADPDSDNKKVITRRVNNRYAEDYEIPSSVTSNSNYSWGDHSLTMLYGGSVPNITFESAAEDLRLSTNMALSIIHNGYAGTRRIQCNLMKQYASLGDKFIIYDSSFDDANRFNLVPLFKFGKDENSDDSICIYNENPSSEDKKWYFSSKDDNKTADYNGGTQCIDAGTSNKDFYYNLQEIEVISVTGGYWSSYKISNPININTGIDSAKVKVTVKAGGDDQIFTADNSTYVPQQPAPSFEEMIYQFNNLTIDCKNLNFIDNQAHIEIDFTATAQDGRFLGAETFIIPVTKKVLGTENVIALYSENNGVQYMQIGAYRTRLNTLFAQQLVSRANRGIDAVLSMETQNIQEPQLGAGTYVQLVLDKYDESIHGTNKSFAIEYVDIFKENDSFVIYQGELSETSQTVVKVFLSYFIEATGNKNHLWVRAKYQKETTDKILFDRTDEKDPHGWFLSDDHKTFSGLSSAQALKNDSEPMDFSGANALYFWELFYYTPMMMAHRLLQEQNFDAANHWFRYVWSPSGYIVDGKIAIYHWNVRPLEEDTSWNAQQLDSTDPDAVAQDDPMHYKVATFMATLDLLMARGDAAYRQLERDTLAEAKMWYTQALNLLGDEPQVMLSTTWANPTLGNAASKTTQQVRQQVLTQLRLNSRVKTPLLGTANSLTALFLPQENSKLKGYWRTLAQRMFNLRHNLSIDGQPLSLPLYAKPADPKALLSAAVSASQGGADLPKAPLTIHRFPQMLEGARGLVNQLIQFGSSLLGYSERQDAEAMSQLLQTQASELILTSIRMQDNQLAELDSEKTALQVSLAGVQQRFDSYSQLYEENINAGEQRALALRSESAIESQGAQISRMAGAGVDMAPNIFGLADGGMHYGAIAYAIADGIELSASAKMVDAEKVAQSEIYRRRRQEWKIQRDNAQAEINQLNAQLESLSIRREAAEMQKEYLKTQQAQAQAQLTFLRSKFSNQALYSWLRGRLSGIYFQFYDLAVSRCLMAEQSYQWEANDNSISFVKPGAWQGTYAGLLCGEALIQNLAQMEEAYLKWESRALEVERTVSLAVVYDSLEGNDRFNLAEQIPALLDKGEGTAGTKENGLSLANAILSASVKLSDLKLGTDYPDSIVGSNKVRRIKQISVSLPALVGPYQDVQAMLSYGGSTQLPKGCSALAVSHGTNDSGQFQLDFNDGKYLPFEGIALDDQGTLNLQFPNATDKQKAILQTMSDIILHIRYTIR

SEQ ID NO: 25 - protein, 2516 aa, Photorhabdus luminescens
MNESVKEIPDVLKSQCGFNCLTDISHSSFNEFRQQVSEHLSWSETHDLYHDAQQAQKDNRLYEARILKRANPQLQNAVHLAILAPNAELIGYNNQFSGRASQYVAPGTVSSMFSPAAYLTELYREARNLHASDSVYYLDTRRPDLKSMALSQQNMDIELSTLSLSNELLLESIKTESKLENYTKVMEMLSTFRPSGATPYHDAYENVREVIQLQDPGLEQLNASPAIAGLMHQASLLGINASISPELFNILTEEITEGNAEELYKKNFGNIEPASLAMPEYLKRYYNLSDEELSQFIGKASNFGQQEYSNNQLITPVVNSSDGTVKVYRITREYTTNAYQMDVELFPFGGENYRLDYKFKNFYNASYLSIKLNDKRELVRTEGAPQVNIEYSANITLNTADISQPFEIGLTRVLPSGSWAYAAAKFTVEEYNQYSFLLKLNKAIRLSRATELSPTILEGIVRSVNLQLDINTDVLGKVFLTKYYMQRYAIHAETALILCNAPISQRSYDNQPSQFDRLFNTPLLNGQYFSTGDEEIDLNSGSTGDWRKTILKRAFNIDDVSLFRLLKITDHDNKDGKIKNNLKNLSNLYIGKLLADIHQLTIDELDLLLIAVGEGKTNLSAISDKQLATLIRKLNTITSWLHTQKWSVFQLFIMTSTSYNKTLTPEIKNLLDTVYHGLQGFDKDKADLLHVMAPYIAATLQLSSENVAHSVLLWADKLQPGDGAMTAEKFWDWLNTKYTPGSSEAVETQEHIVQYCQALAQLEMVYHSTGINENAFRLFVTKPEMFGAATGAAPAHDALSLIMLTRFADWVNALGEKASSVLAAFEANSLTAEQLADAMNLDANLLLQASIQAQNHQHLPPVTPENAFSCWTSINTILQWVNVAQQLNVAPQGVSALVGLDYIQSMKETPTYAQWENAAGVLTAGLNSQQANTLHAFLDESRSAALSTYYIRQVAKAAAAIKSRDDLYQYLLIDNQVSAAIKTTRIAEAIASIQLYVNRALENVEENANSGVISRQFFIDWDKYNKRYSTWAGVSQLVYYPENYIDPTMRIGQTKMMDALLQSVSQSQLNADTVEDAFMSYLTSFEQVANLKVISAYHDNINNDQGLTYFIGLSETDAGEYYWRSVDHSKFNDGKFAANAWSEWHKIDCPINPYKSTIRPVIYKSRLYLLWLEQKEITKQTGNSKDGYQTETDYRYELKLAHIRYDGTWNTPITFDVNKKISELKLEKNRAPGLYCAGYQGEDTLLVMFYNQQDTLDSYKNASMQGLYIFADMASKDMTPEQSNVYRDNSYQQFDTNNVRRVNNRYAEDYEIPSSVSSRKDYGWGDYYLSMVYNGDIPTINYKAASSDLKIYISPKLRIIHNGYEGQKRNQCNLMNKYGKLGDKFIVYTSLGVNPNNSSNKLMFYPVYQYSGNTSGLNQGRLLFHRDTTYPSKVEAWIPGAKRSLTNQNAAIGDDYATDSLNKPDDLKQYIFMTDSKGTATDVSGPVEINTAISPAKVQIIVKAGGKEQTFTADKDVSIQPSPSFDEMNYQFNALEIDGSGLNFINNSASIDVTFTAFAEDGRKLGYESFSIPVTLKVSTDNALTLHHNENGAQYMQWQSYRTRLNTLFARQLVARATTGIDTILSMETQNIQEPQLGKGFYATFVIPPYNLSTHGDERWFKLYIKHVVDNNSHIIYSGQLTDTNINITLFIPLDDVPLNQDYHAKVYMTFKKSPSDGTWWGPHFVRDDKGIVTINPKSILTHFESVNVLNNISSEPMDFSGANSLYFWELFYYTPMLVAQRLLHEQNFDEANRWLKYVWSPSGYIVHGQIQNYQWNVRPLLEDTSWNSDPLDSVDPDAVAQHDPMHYKVSTFMRTLDLLIARGDHAYRQLERDTLNEAKMWYMQALHLLGDKPYLPLSTTWSDPRLDRAADITTQNAHDSAIVALRQNIPTPAPLSLRSANTLTDLFLPQINEVMMNYWQTLAQRVYNLRHNLSIDGQPLYLPIYATPADPKALLSAAVATSQGGGKLPESFMSLWRFPHMLENARGMVSQLTQFGSTLQNIIERQDAEALNALLQNQAAELILTNLSIQDKTIEELDAEKTVLEKSKAGAQSRFDSYGKLYDENINAGENQAMTLRASAAGLTTAVQASRLAGAAADLVPNIFGFAGGGSRWGAIAEATGYVMEFSANVMNTEADKISQSETYRRRRQEWEIQRNNAEAELKQIDAQLKSLAVRREAAVLQKTSLKTQQEQTQSQLAFLQRKFSNQALYNWLRGRLAAIYFQFYDLAVARCLMAEQAYRWELNDDSARFIKPGAWQGTYAGLLAGETLMLSLAQMEDAHLKRDKRALEVERTVSLAEVYAGLPKDNGPFSLAQEIDKLVSQGSGSAGSGNNNLAFGAGTDTKTSLQASVSFADLKIREDYPASLGKIRRIKQISVTLPALLGPYQDVQAILSYGDKAGLANGCEALAVSHGMNDSGQFQLDFNDGKFLPFEGIAIDQGTLTLSFPNASMPEKGKQATMLKTLNDIILHIRYTIK

SEQ ID NO: 26 - protein, 2499 aa, Photorhabdus luminescens
MNTLKSEYQQALGAGFNNLTDICHLSFDELRKKVKDKLSWSQTQSLYLEAQQVQKDNLLHEARILKRANPHLQSAVHLALTAPHADQQGYNSRFGNRASKYAAPGAISSMFSLAAYLTELYRQARNLHAEGSIYHLDTRRPDLKSLVLSQKNMNTEISTLSLSNNMLLNSIKTQPNLNSHAKVMEKLSTFRTSGSMPYHDAYESVRKIIQLQAPVFEQSSTLTDTPITKLMYQISLLGINASVSPELFTILTQKIKPATNADNTNELKKLYKKNFGEIKSIQMARAEYLKSYYNLTDKELNQFSKKIKQIDSLWNIGDEITQYHLLKFNKAINLSRSTELSPIILNSIAIDILKKTPPEDDSDNPFRDDPDYLESFQDLDLSDEPDIDEDVLREALRVKDYMQRYGIDAETALILCKAPISENPSHPDLSKLLADIHQLTIDELGVLLVAIDEGKTDLSQITHDNLAVLISKLYSVTNWLRTRKWSVYQLFVMTTDKYNKTLTPEINNLLDTVYNGLQNFYKDNLLKIKDNLLKAKESLPEDKDNLPKAEQYLLEAEKYLLAAEKYLLAAEKYLLEANKNPLEAKKALKEYEKNQEAYEKNLKEHEKYLLKAGENLPAIKENLLKIKENLPKAISPYIAAALQLPSENVALSVLAWADKLNSGKENKMTADSFWNWLRKKPIETQSKTTEATEATEATEATEATEATEKTTLIQQAVQYCQCLAQLALIYRSTGLSESTLRLFVTNPQIFGLTAKTTSTHNVLSLIMLTRFTDWVNSLGENASSVLTEFEKGTLTAELLANAMNLDKNLLEQASTQAQADFSNWPSIDNLLQWINISRQLNISPQGVSELAKILDIESSTNYAQWENVASILTAGLDTQKANTLHAFLGESRSTALSTYYIYSHNQKDREERKHTVIKDRDDLYQYLLIDNQVSAAIKTTEIAEAIASIQLYINRALKNMEGDTDTSVTSRLFFTNWDKYNKRYSTWAGITKLLYYPENYIDPTLRIGQTKMMDTLLQSISQSQLNTDTVEDAFKSYLTSFEQVANLEVISAYHDNINNDQGLTYFIGRSKTEVNQYYWRSVDHNKFSEGKFPANAWSEWHKIDCPINPYEDTIRPVVYQSRLYIIWLEQKKVTNRAEGEAIKQGSKTTTSYHYELKLAHIRYDGTWNTPITFDVDEKISGLNLELNKALGLYCASYQGKDKLLVMFYKKQEQLNNYTEKTGNTYTAPIKGLYITSNMSPEEMTPESYRLNAHKQFDTNNVVRVNNRYAESYEIPSSVNSNNGYDWGEGYLSMVYGGSILITRDPSDNSKIQISPKLRIIHNGYEGRQRNQCNLMKKYGKLGDKFIIYTTLGINPNNLSNKKLIYPVYQYEGNESKLSQGRLLFYRDSTTNFTRAWFPNLSSDSKEMSITTGGNISGNYGYIDNKHSDNKPFEEYFYMDDHGGIDTDVSEPIFINTKIQPSNVKIIVKTVKDDGKLDSKPYIAEDKVSVKPTPNFEEMCYQFNNLDQIDVSTLVFKNNEASIDITFTASADAFESGKEQRNLGEEHFSIRIIKKANVNDVLTLHHDPSGAQYMQWGAYRTRLNTLFARKLISRANAGIDTILSMETQNIQEPQLGKGFYVNFTLPKYDQNTHGNERQFKIHIGNIAGDNTMRPYYQGILADTETSVVLFVPYEKQSYTNEGVRLGVEYKKVSYLGVWEPAFFYFNEIQQKFILINDADHNSAMTQSGEKTGIKKYKGFLDVSILIDHQHTEPMDFNGANSLYFWELFYYTPMLIAQRLLHEQNFDEANRWLKYVWNPSGHIANGQKQHPHNWNVRPLQEDTSWNDDPLDTFDPDAIAQHDPMHYKVATFMCALDLLIEQGDYAYRQLERDTLAEAKMWYMQALHLLGDKPHLLLSSTWSDPELKEAADLEKQQAHAKAIADLRQGQPKDGSNTDLFLPQVNEVMLSYWQKLEQRLYNLRHNLSIDGQPLHLPIFATPADPKALLSAAVASSQGGSNLPSEFISVWRFPHMLENARSMVSQLTQFGSTLQNIIERQDAEALNTLLQNQAAELILTNLSIQDKTIEELDVEKTVLEKTRAGAKSRFDSYSKFYDEDINAGEKQAMALRASVAGISTALQASHLAGAALDLAPNIFGFADGGSHWGAIAQATSNVMEFSASVMSTEADKISQSEAYRRRRQEWKIQRNNADAELKQIDAQLQSLVVRREAAVLQKTSLKTQQEQTHAQLTFLQHKFSNQALYNWLRGRLSAIYFQFYDLAVARCLMAEMAYRWETNDAAARFIKPGAWQGTHAGLLAGETLMLNLAQMEDAHLKQEQRVLEVERTVSLAEVYKEKGQFSLTKKIAELVNKKPDTTSSRNNTLNFGEGNAKTSLQASISLADLQIRHDYPENSGAGNVRRIKQISVTLPALLGPYQDVQAILSYGGDATGLAKGCKALAVSHGMNDSGQFQLDFNDGKFLPFEGIEIDKGTLTLSFPNATEKQKTMLESISDIILHIRYTIRQ

SEQ ID NO: 27 - protein, 2381 aa, Photorhabdus luminescens
MNSYVKEIPDVLQSQYGINCLTDICHYSFNEFRQQVSDHLSWSETNRLYRDAQQEQKENQLYEARILKRANPQLQNAVHLGITLPHAELRGYNSEFGGRASQYVAPGSVSSMFSPAAYLTELYREARNLHASDSVYHLDERRPDLQSMTLSQQNMDTELSTLSLSNEILLKGIKANQSNLDSDTKVMEMLSTFRPSGTIPYHDAYENVRKAIQLQDPKLEQFQKSPAVAGLMHQASLLGINNSISPELFNILTEEITEANAEAIYKQNFGDIDPACLAMPEYLKSYYNFSDEELSQFIRKYPDNELNTQKIHLLKINKIILLSQAVNLPFLKLDEIIPEQNITPTVLGKIFLVKYYMQKYNIGTETALILCNDSISQYSYSNQPSQFDRLFNTSPLNGQYFVIEDTNIDLSLNSTDNWHKAVLKRAFNVDDISLYRLLHIANHNNTDGKIANNIKNLSNLYMTKLLADIHQLTIDELYLLLITIGEDKINLYDIDDKELEKLINRLDTLSNWLHTQKWSIYQLFLMTTTNYDKTLTPEIQNLLDTVYNGLQNFDKNKTKLLAAIAPYIAATLQLPSENVAHSILLWADKIKPSENKITAEKFWIWLQNRDTTELSKPPEMQEQIIQYCHCLAQLTMIYRSSGINENAFRLFIEKPTIFGIPDEPNKATPAHNAPTLIILTRFANWVNSLGEKASPILTAFENKTLTAEKLANAMNLDANLLEQASIQAQNYKQVTKENTFSNWQSIDIILQWTNIASNLNISPQGISPLIALDYIKPAQKTPTYAQWENAAIALTAGLDTQQTHTLHVFLDESRSTALSNYYIGKVANRAASIKSRDDLYQYLLIDNQVSAEIKTTRIAEAIASIQLYVNRALENIEIHAVSDVITRQFFIDWDKYNKRYSTWAGVSQLVYYPENYIDPTMRIGQTKMMDTLLQSVSQSQLNADTVEDAFKSYLTSFEQVANLEVISAYHDNVNNDQGLTYFIGNSKTEVNQYYWRSVDHSKFNDGKFAANAWSEWHKIDCAINPYQSTIRPVIYKSRLYLIWLEQKETAKQKEDNKVTTDYHYELKLAHIRYDGTWNVPITFDVDEKILALELTKSQAPGLYCAGYQGEDTLLIMFYRKKEKLDDYKTAPMQGFYIFSDMSSKDMTNEQCNSYRDNGYTHFDTNSDTNSVIRINNRYAEDYEIPSLINHSNSHDWGEYNLSQVYGGNIVINYKVTSNDLKIYISPKLRIIHDGKEGRERIQSNLIKKYGKLGDKFIIYTSLGINPNNSSNRFMFYPVYQYNGNTSGLAQGRLLFHRDTSYSSKVAAWIPGAGRSLINENANIGDDCAEDSVNKPDDLKQYIYMTDSKGTATDVSGPVDINTAISSEKVQITIKAGKEYSLTANKDVSVQPSPSFEEMCYQFNALEIDGSNLNFTNNSASIDVTFTALADDGRKLGYEIFNIPVIQKVKTDNALTLFHDENGAQYMQWGAYRIRLNTLFARQLVERANTGIDTILSMETQNIQEPMMGIGAYIELILDKYNPDIHGTNKSFKIIYGDIFKAGDHFPIYQGALSDITQTTVKLFLPRVDNAYGNKNNLYVYAAYQKVETNFIRFVKEDNNKPATFDTTYKNGTFPGLASARVIQTVSEPMDFSGANSLYFWELFYYTPMMVAQRLLHEQNFDEANRWLKYVWSPSGYIVRGQIKNYHWNVRPLLENTSWNSDPLDSVDPDAVAQHDPMHYKVATFMRTLDLLMARGDHAYRQLERDTLNEAKMWYMQALHLLGNKPYLPLSSVWNDPRLDNAAATTTQKAHAYAITSLRQGTQTPALLLRSANTLTDLFLPQINDVMLSYWNKLELRLYNLRHNLSIDGQPLHLPIYATPADPKALLSAAVATSQGGGKLPESFISLWRFPHMLENARSMVTQLIQFGSTLQNIIERQDAESLNALLQNQAKELILTTLSIQDKTIEEIDAEKTVLEKSKAGAKSRFDNYSKLYDEDVNAGERQALDMRIASQSITSGLKGLHMAAAALEMVPNIYGFAVGGTRYGAIANAIAIGGGIAAEGLLIEAEKVSQSEIWRRRRQEWEIQRNNAEAEMKQIDAQLKSLTVRREAAVLQKTGLKTQQEQTQAQLAFLQRKFSNQALYNWLRGRLAAIYFQFYDLVVARCLMAEQAYRWETNDSSARFIKPGAWQGTYAGLLAGETLMLNLAQMEDAHLKQEQRALEVERTVSLAQVYQSLGEKSFALKDKIEALLQGDKETSAGNDGNQLKLTNNTLSATLTLQDLKLKDDYPEEMQLGKTRRIKQISVSLPALLGPYQDVQAVLSYGGDATGLAKGCKALAVSHGLNDNGQFQLDFNDGKFLPFEGIDINDKGTFTLSFPNAASKQKNILQMLTDIILHIRYTILE

SEQ ID NO: 28 - DNA, 4431 bp, Photorhabdus luminescens
atgcagaattcacaaacattcagtgttaccgagctgtcattacccaaaggcggcggcgctattaccggtatgggtgaagcattaacaccagccgggccggatggtatggccgccttatccctgccattacccatttccgccgggcgtggttacgcaccctcgctcactctgaattacaacagtggaaccggtaacagcccatttggtctcggttgggactgcggcgtcatggcaattcgtcgtcgcaccagtaccggcgtaccgaattacgatgaaaccgatacttttctggggccggaaggtgaagtgttggtcgtagcattaaatgaggcaggtcaagctgatatccgcagtgaatcctcattgcagggcatcaatttgggtgcgaccttcaccgttacctgttatcgctcccgcctagaaagccactttaaccggttggaatactggcaaccccaaacaaccggcgcaaccgatttctggctgatatacagccccgacggacaggtccatttactgggcaaaaatcctcaggcacgtatcagcaatccactcaatgttaaccaaacagcgcaatggctgttggaagcctcgatatcatcccacagcgaacagatttattatcaatatcgcgctgaagatgaagcaggttgtgaaaccgacgagctagcagcccaccccagcgcaaccgttcagcgctacctgcaaacagtacattacgggaacctgaccgccagcgacgtttttcctacactaaacggagatgacccacttaaatctggctggatgttctgtttagtatttgactacggtgagcgcaaaaacagcttatctgaaatgccgctgtttaaagccacaggcaattggctttgccgaaaagaccgtttttcccgttatgagtacggttttgaattgcgtactcgccgcttatgccgccaaatactgatgtttcaccgtctacaaaccctatctggtcaggcaaagggggatgatgaacctgcgctagtgtcgcgtctgatactggattatgacgaaaacgcgatggtcagtacgctcgtttctgtccgccgggtaggccatgaggacaacaacacggttaccgcgctgccaccactggaactggcctatcagccttttgagccagaacaaaccgcactctggcaatcaatggatgtactggcaaatttcaacaccattcagcgctggcaactgcttgacctgaaaggagaaggcgtgcccggcattctctatcaggatagaaatggctggtggtatcgatctgcccaacgtcaggccggggaagagatgaatgcggtcacctgggggaaaatgcaactccttcccatcacaccagctgtgcaggataacgcctcactgatggatattaacggtgacgggcaactggactgggtgattaccgggccggggctaaggggctatcacagccaacacccggatggcagttggacgcgttttacgccattacatgccctgccgatagaatattctcatcctcgcgctcaacttgccgatttaatgggagccgggctgtccgatttagtgctaattggtcccaaaagtgtgcgcttatatgtcaataaccgtgatggttttaccgaagggcgggatgtggtgcaatccggtgatatcaccctgccgctaccgggcgccgatgcccgtaagttagtggcatttagtgacgtactgggttcaggccaagcacatctggttgaagttagtgcaactcaagtcacctgctggccgaatctggggcatggccgttttggtcagccaatcgtattgccgggattcagccaatctgccgccagttttaatcctgatcgagttcatctggccgatttggatgggagcggccctgccgatttgatttatgttcatgctgaccgtctggatattttcagcaatgaaagtggcaacggttttgcaaaaccattcacactctcttttcctgacggcctgcgttttgatgatacctgccagttgcaagtagccgatgtacaagggttaggcgttgtcagcctgatcctaagcgtaccgcatatggcgccacatcattggcgctgcgatctgaccaacgcgaaaccgtggttactcagtgaaacgaacaacaatatgggggccaatcacaccttgcattaccgtagctctgtccagttctggctggatgaaaaagctgcggcattggctaccggacaaacaccggtctgttacctgcccttcccggtccataccctttggcaaacagaaaccgaggatgaaatcagcggcaataagttagtgaccacgttacgttatgctcacggcgcttgggatggacgtgaacgggaatttcgtggctttggttatgttgagcagacagacagccatcaactcgctcaaggcaatgcgccggaacgtacaccaccggcactcaccaaaagctggtatgccaccggattacctgcggtagataatgcgttatccgccgggtattggcgtggcgataagcaagctttcgccggttttacgccacgttttactctctggaaagagggcaaagatgttccactgacaccggaagatgaccataatctatactggttaaaccgggcgctaaaaggtcagccactgcgtagtgaactctacgggctggatggcagcgcacagcaacagatcccctatacagtgactgaatcccgtccacaggtgcgccaattacaagatggcgccaccgtttccccggtgctctgggcctcagtcgtggaaagccgtagttatcactacgaacgtattatcagtgatccccagtgcaatcaggatatcacgttgtccagtgacctattcgggcaaccactgaaacaggtttccgtacaatatccccgccgcaacaaaccaacaaccaatccgtatcccgataccctaccggatacgctgtttgccagcagttatgacgatcaacaacagctattgcgattaacctgccgacaatccagttggcaccatcttattggtaatgagctaagagtgttgggattaccggatggcacacgcagtgatgcctttacttacgatgccaaacaggtacctgtcgatggcttaaatctggaaaccctgtgtgctgaaaatagcctgattgccgatgataaacctcgcgaatacctcaatcagcaacgaacgttctataccgacgggaaaaaccaaacaccgctgaaaacaccgacacgacaagcgttaatcgcctttaccgaaacggcggtattaacggaatctctgttatccgcgtttgatggcggtattacgccagacgaattaccgggaatactgacacaggccggataccaacaagagccttatctgtttccacgcaccggcgaaaacaaagtttgggtagcgcgtcaaggctataccgattacgggacggaagcacaattttggcgtcctgtcgcacaacgtaacagcctgttaaccgggaaaatgacgttaaaatgggatactcactattgtgtcatcacccaaacccaagatgctgccggcctcaccgtctcagccaattatgactggcgttttctcacaccaacgcaactgactgacatcaacgataatgtgcatctcatcaccttggatgctctgggacgccctgtcacgcaacgtttctgggggatcgaaagcggtgtggcaacaggttactcttcatcagaagaaaaaccattctctccaccaaacgatatcgataccgctattaatctaaccggaccactccctgtcgcacagtgtctggtctatgcaccggacagttggatgccactattcagtcaagaaaccttcaacacattaacgcaggaagagcaggagacgctgcgtgattcacgtattatcacggaagattggcgtatttgcgcactgactcgccgccgttggctacaaagtcaaaagatcagtacaccattagttaaactgttaaccaacagcattggtttacctccccataaccttacgctgaccacagaccgttatgaccgcgactctgagcagcaaattcgccaacaagtcgcatttagtgatggttttggccgtctgctacaagcgtctgtacgacatgaggcaggcgaagcctggcaacgtaaccaagacggttctctggtgacaaaagtggagaataccaaaacgcgttgggcggtcacgggacgcaccgaatatgataataaagggcaaacgatacgcacttatcagccctatttcctcaacgactggcgatatgtcagtgatgacagcgccagaaaagaagcctatgcggatactcatatttatgatccaattgggcgagaaatccgggttattactgcaaaaggctggctgcgccaaagccaatatttcccgtggtttaccgtgagtgaggatgagaatgatacggccgctgatgcgctggtgtaa

SEQ ID NO: 29 - DNA, 4425 bp, Photorhabdus luminescens
atgcaaaattcacaagattttagtattacggaactgtcactgcccaaaggggggggcgctatcacgggaatgggtgaagcattaacccccactggaccggatggtatggccgcgctatctctaccattgcctatttctgccgggcgcggttatgctcccgcattcactctgaattacaacagcggcgccggtaacagtccatttggtctgggttgggattgcaacgttatgactatccgccgccgcacccattttggcgtcccccattatgacgaaaccgatacctttttggggccagaaggcgaagtgctggtggtagcggatcaacctcgcgacgaatccacattacagggtatcaatttaggcgccacctttaccgttaccggctaccgttcccgtctggaaagccatttcagccgattggaatattggcaacccaaaacaacaggtaaaacagatttttggttgatatatagcccagatgggcaggtgcatctactgggtaaatcaccgcaagcgcggatcagcaacccatcccaaacgacacaaacagcacaatggctgctggaagcctctgtatcatcacgtggcgaacaaatttattatcaatatcgcgccgaagatgacacaggttgcgaagcagatgaaattacgcaccatttacaggctacagcgcaacgttatttacacatcgtgtattacggcaaccgtacagccagcgaaacattacccggtctggatggcagcgccccatcacaagcagactggttgttctatctggtatttgattacggcgaacgcagtaacaacctgaaaacgccaccagcattttcgactacaggtagctggctttgccgtcaggaccgtttttcccgttatgaatatggctttgagattcgtacccgccgcttatgccgtcaggtattgatgtaccatcacctgcaagcactggatagtaagataacagaacacaacggaccaacgctggtttcacgcctgatactcaattacgacgaaagcgcgatagccagcacgctagtattcgttcgccgagtgggacacgagcaagatggtaatgtcgtcaccctgccgccattagaattggcatatcaggatttttcaccgcgacatcacgctcactggcaaccaatggatgtactggcaaacttcaatgccattcagcgctggcagctagtcgatctaaaaggcgaaggattacccggcctgttatatcaggataaaggcgcttggtggtaccgctccgcacagcgtctgggcgaaattggctcagatgccgtcacttgggaaaagatgcaacctttatcggttattccttctttgcaaagtaatgcctcgttggtggatatcaatggagacggccaacttgactgggttatcaccggaccgggattacggggatatcatagtcaacgcccggatggcagttggacacgttttaccccactcaacgctctgccggtggaatacacccatccacgcgcgcaactcgcagatttaatgggagccgggctatccgatttggtgctgatcggccctaagagcgtgcgtttatatgccaatacccgcgacggctttgccaaaggaaaagatgtggtgcaatccggtgatatcacactgccggtgccgggcgccgatccacgtaagttggtggcgtttagtgatgtattgggttcaggtcaagcccatctggttgaagtaagcgcgactaaagtcacctgctggcctaatctggggcgcggacgttttggtcaacccattaccttaccgggattcagccagccagcaaccgagtttaacccggctcaagtttatctggccgatctggatggcagcggtccaacggatctgatttatgttcatacaaaccgtctggatatcttcctgaacaaaagtggcaatggctttgctgaaccagtgacattacgcttcccggaaggtctgcgttttgatcatacctgtcagttacaaatggccgatgtacaaggattaggcgtcgccagcctgatactgagcgtgccgcatatgtctccccatcactggcgctgcgatctgaccaacatgaagccgtggttactcaatgaaatgaacaacaatatgggggtccatcacaccttgcgttaccgcagttcctcccaattctggctggatgaaaaagccgcggcgctgactaccggacaaacaccggtttgctatctccccttcccgatccacaccctatggcaaacggaaacagaagatgaaatcagcggcaacaaattagtcacaacacttcgttatgctcgtggcgcatgggacggacgcgagcgggaatttcgcggatttggttatgtagagcagacagacagccatcaactggctcaaggcaacgcgccagaacgtacgccaccggcgctgaccaaaaactggtatgccaccggactgccggtgatagataacgcattatcaaccgagtattggcgtgatgatcaggcttttgccggtttctcaccgcgctttacgacttggcaagataacaaagatgtcccgttaacaccggaagatgataacagtcgttactggttcaaccgcgcgttgaaaggtcaactgctacgtagtgaactgtacggattggacgatagtacaaataaacacgttccctatactgtcactgaatttcgttcacaggtacgtcgattacagcataccgacagccgataccctgtactttggtcatctgtagttgaaagccgcaactatcactacgaacgtatcgccagcgacccgcaatgcagtcaaaatattacgctatccagtgatcgatttggtcagccgctaaaacagctttcggtacagtacccgcgccgccagcagccagcaatcaatctgtatcctgatacattgcctgataagttgttagccaacagctatgatgaccaacaacgccaattacggctcacctatcaacaatccagttggcatcacctgaccaacaataccgttcgagtattgggattaccggatagtacccgcagtgatatctttacttatggcgctgaaaatgtgcctgctggtggtttaaatctggaacttctgagtgataaaaatagcctgatcgcggacgataaaccacgtgaatacctcggtcagcaaaaaaccgcttataccgatggacaaaatacaacgccgttgcaaacaccaacacggcaagccctgattgcctttaccgaaacaacggtattcaaccagtccacattatcagcgtttaacggaagcatcccgtccgataaattatcaacgacgctggagcaagctggatatcagcaaacaaattatctattccctcgcactggagaagataaagtttgggtagcccatcacggctataccgattatggtacagcggcacagttctggcgcccgcaaaaacagagcaacacccaactcaccggtaaaatcaccctcatctgggatgcaaactattgcgttgtggtacaaacccgggatgctgctggactgacaacctcagccaaatatgactggcgttttctgaccccggtgcaactcaccgatatcaatgacaatcagcaccttatcacactggatgcattgggccgaccaatcacattgcgcttttggggaactgaaaacggcaagatgacaggttattcctcaccggaaaaagcatcattttctccaccatccgatgttaatgccgctattgagttaaaaaaaccgctccctgtagcacagtgtcaggtctacgcaccagaaagctggatgccagtattaagtcagaaaaccttcaatcgactggcagaacaagattggcaaaagttatataacgcccgaatcatcaccgaagatggacgtatctgcacactggcttatcgccgctgggtacaaagccaaaaggcaatccctcaactcattagcctgttaaacaacggaccccgtttacctcctcacagcctgacattgacgacggatcgttatgatcacgatcctgagcaacagatccgtcaacaggtggtattcagtgatggctttggccgcttgctgcaagccgctgcccgacatgaggcaggcatggcccggcaacgcaatgaagacggctctttgattataaatgtccagcatactgagaaccgttgggcagtgactggacgaacggaatatgacaataaggggcaaccgatacgtacctatcagccctatttcctcaatgactggcgatacgtcagcaatgatagtgcccggcaggaaaaagaagcttatgcagatacccatgtctatgatcccataggtcgagaaatcaaggttatcaccgcaaaaggttggttccgtcgaaccttgttcactccctggtttactgtcaatgaagatgaaaatgacacagccgctgaggtgaagaaggtaaagatgtaa

SEQ ID NO: 30 - DNA, 4458 bp, Photorhabdus luminescens
atgcaggattcaccagaagtatcgattacaacgctgtcacttcccaaaggtggcggtgctatcaatggcatgggagaagcactgaatgctgccggccctgatggaatggcctccctatctctgccattacccctttcgaccggcagagggacggctcctggattatcgctgatttacagcaacagtgcaggtaatgggcctttcggcatcggctggcaatgcggtgttatgtccattagccgacgcacccaacatggcattccacaatacggtaatgacgacacgttcctatccccacaaggcgaggtcatgaatatcgccctgaatgaccaagggcaacctgatatccgtcaagacgttaaaacgctgcaaggcgttaccttgccaatttcctataccgtgacccgctatcaagcccgccagatcctggatttcagtaaaatcgaatactggcaacctgcctccggtcaagaaggacgcgctttctggctgatatcgtcaccggacggccaactacacatcttagggaaaaccgcgcaggcttgtctggcaaatccgcaaaatgaccaacaaatcgcccagtggttgctggaagaaactgtgacgccagccggtgaacatgtcagctatcaatatcgagccgaagatgaagcccattgtgacgacaatgaaaaaaccgctcatcccaatgttaccgcacagcgctatctggtacaggtgaactacggcaacatcaaaccacaagccagcctgttcgtactggataacgcacctcccgcaccggaagagtggctgtttcatctggtctttgaccacggtgagcgcgatacctcacttcataccgtgccaacatgggatgcaggtacagcgcaatggtctgtacgcccggatatcttctctcgctatgaatatggttttgaagtgcgtactcgccgcttatgtcaacaagtgctgatgtttcaccgcaccgcgctcatggccggagaagccagtaccaatgacgccccggaactggttggacgcttaatactggaatatgacaaaaacgccagcgtcaccacgttgattaccatccgtcaattaagccatgaatcggacggcagcccagtcacccagccaccactagaactagcctggcaacggtttgatctggagaaaatgccgacatggcaacgctttgacgcactagataattttaactcgcagcaacgttatcaactggttgatctgcggggagaagggttgccaggtatgctgtatcaagatcgaggcgcttggtggtataaagctccgcaacgtcaggaagacggagacagcaatgccgtcacttacgacaaaatcgccccactgcctaccctacccaatttgcaggataatgcctcattgatggatatcaacggagacggccaactggattgggttgttaccgcctccggtattcgcggataccatagtcagcaacccgatggaaagtggacgcactttacgccaatcaatgccttgcccgtggaatattttcatccaagcatccagttcgctgaccttaccggggcaggcttatctgatttagtgttgatcgggccgaaaagcgtgcgtctatatgccaaccagcgaaacggctggcgtaaaggagaagatgtcccccaatccacaggtatcaccctgcctgtcacagggaccgatgcccgcaaactggtggctttcagtgatatgctcggttccggtcaacaacatctggtggaaatcaaggctaatcgcgtcacctgttggccgaatctagggcatggccgtttcggtcaaccactaactctgtcaggatttagccagcccgaaaatagcttcaatcccgaacggctgtttctggcggatatcgacggctccggcaccaccgaccttatctatgcgcaatccggctctttgctcatttatctcaaccaaagtggtaatcagtttgatgccccgttgacattagcgttgccagaaggcgtacaatttgacaacacttgccaacttcaagtcgccgatattcagggattagggatagccagcttgattctgactgtgccacatatcgcgccacatcactggcgttgtgacctgtcactgaccaaaccctggttgttgaatgtaatgaacaataaccggggcgcacatcacacgctacattatcgtagttccgcgcaattctggttggatgaaaaattacagctcaccaaagcaggcaaatctccggcttgttatctgccgtttccaatgcatttgctatggtataccgaaattcaggatgaaatcagcggcaaccggctcaccagtgaagtcaactacagccacggcgtctgggatggtaaagagcgggaattcagaggatttggctgcatcaaacagacagataccacaacgttttctcacggcaccgcccccgaacaggcggcaccgtcgctgagtattagctggtttgccaccggcatggatgaagtagacagccaattagctacggaatattggcaggcagacacgcaagcttatagcggatttgaaacccgttataccgtctgggatcacaccaaccagacagaccaagcatttacccccaatgagacacaacgtaactggctgacgcgagcgcttaaaggccaactgctacgcactgagctctacggtctggacggaacagataagcaaacagtgccttataccgtcagtgaatcgcgctatcaggtacgctctattcccgtaaataaagaaactgaattatctgcctgggtgactgctattgaaaatcgcagctaccactatgaacgtatcatcactgacccacagttcagccagagtatcaagttgcaacacgatatctttggtcaatcactgcaaagtgtcgatattgcctggccgcgccgcgaaaaaccagcagtgaatccctacccgcctaccctgccggaaacgctatttgacagcagctatgatgatcaacaacaactattacgtctggtgagacaaaaaaatagctggcatcacctgactgatggggaaaactggcgattaggtttaccgaatgcacaacgccgtgatgtttatacttatgaccggagcaaaattccaaccgaagggatttcccttgaaatcttgctgaaagatgatggcctgctagcagatgaaaaagcggccgtttatctgggacaacaacagacgttttacaccgccggtcaagcggaagtcactctagaaaaacccacgttacaagcactggtcgcgttccaagaaaccgccatgatggacgatacctcattacaggcgtatgaaggcgtgattgaagagcaagagttgaataccgcgctgacacaggccggttatcagcaagtcgcgcggttgtttaataccagatcagaaagcccggtatgggcggcacggcaaggttataccgattacggtgacgccgcacagttctggcggcctcaggctcagcgtaactcgttgctgacagggaaaaccacactgacctgggatacccatcattgtgtaataatacagactcaagatgccgctggattaacgacgcaagcccattacgattatcgtttccttacaccggtacaactgacagatattaatgataatcaacatattgtgactctggacgcgctaggtcgcgtaaccaccagccggttctggggcacagaggcaggacaagccgcaggctattccaaccagcccttcacaccaccggactccgtagataaagcgctggcattaaccggcgcactccctgttgcccaatgtttagtctatgccgttgatagctggatgccgtcgttatctttgtctcagctttctcagtcacaagaagaggcagaagcgctatgggcgcaactgcgtgccgctcatatgattaccgaagatgggaaagtgtgtgcgttaagcgggaaacgaggaacaagccatcagaacctgacgattcaacttatttcgctattggcaagtattccccgtttaccgccacatgtactggggatcaccactgatcgctatgatagcgatccgcaacagcagcaccaacagacggtgagctttagtgacggttttggccggttactccagagttcagctcgtcatgagtcaggtgatgcctggcaacgtaaagaggatggcgggctggtcgtggatgcaaatggcgttctggtcagtgcccctacagacacccgatgggccgtttccggtcgcacagaatatgacgacaaaggccaacctgtgcgtacttatcaaccctattttctaaatgactggcgttacgttagtgatgacagcgcacgagatgacctgtttgccgatacccacctttatgatccattgggacgggaatacaaagtcatcactgctaagaaatatttgcgagaaaagctgtacaccccgtggtttattgtcagtgaggatgaaaacgatacagcatcaagaaccccatag

SEQ ID NO: 31 - DNA, 4479 bp, Xenorhabdus nematophilus
atgcagggttcaacacctttgaaacttgaaataccgtcattgccctctgggggcggatcactaaaaggaatgggagaagcactcaatgccgtcggagcggaagggggagcgtcattttcactgcccttgccgatctctgtcgggcgtggtctggtgccggtgctatcactgaattacagcagtactgccggcaatgggtcattcgggatggggtggcaatgtggggttggttttatcagcctgcgtaccgccaagggcgttccgcactatacgggacaagatgagtatctcgggccggatggggaagtgttgagtattgtgccggacagccaagggcaaccagagcaacgcaccgcaacctcactgttggggacggttctgacacagccgcatactgttacccgctatcagtcccgcgtggcagaaaaaatcgttcgtttagaacactggcagccacagcagagacgtgaggaagagacgtctttttgggtactttttactgcggatggtttagtgcacctattcggtaagcatcaccatgcacgtattgctgacccgcaggatgaaaccagaattgcccgctggctgatggaggaaaccgtcacgcataccggggaacatatttactatcactatcgggcagaagacgatcttgactgtgatgagcatgaacttgctcagcattcaggtgttacggcccagcgttatctggcaaaagtcagctatggcaatactcagccggaaaccgcttttttcgcggtaaaatcaggtattcctgctgataatgactggctgtttcatctggtatttgattacggtgagcgctcatcttcgctgaactctgtacccgaattcaatgtgtcagaaaacaatgtgtctgaaaacaatgtgcctgaaaaatggcgttgtcgtccggacagtttctcccgctatgaatatgggtttgaaattcgaacccgtcgcttgtgtcgccaagttctgatgtttcatcagctgaaagcgctggcaggggaaaaggttgcagaagaaacaccggcgctggtttcccgtcttattctggattatgacctgaacaacaaggtttccttgctgcaaacggcccgcagactggcccatgaaacggacggtacgccagtgatgatgtccccgctggaaatggattatcaacgtgttaatcatggcgtgaatctgaactggcagtccatgccgcagttagaaaaaatgaacacgttgcagccataccaattggttgatttatatggagaaggaatttccggcgtactttatcaggatactcagaaagcctggtggtaccgtgctccggtacgggatatcactgccgaaggaacgaatgcggttacctatgaggaggccaaaccactgccacatattccggcacaacaggaaagcgcgatgttgttggacatcaatggtgacgggcgtctggattgggtgattacggcatcagggttacggggctaccacaccatgtcaccggaaggtgaatggacaccctttattccattatccgctgtgccaatggaatatttccatccgcaggcaaaactggctgatattgatggggctgggctgcctgacttagcgcttatcgggccaaatagtgtacgtgtctggtcaaataatcgggcaggatgggatcgcgctcaggatgtgattcatttgtcagatatgccactgccggttcccggcagaaatgagcgtcatcttgtcgcattcagtgatatgacaggctccgggcaatcacatctggtggaagtaacggcagatagcgtgcgctactggccgaacctggggcatggaaaatttggtgagcctctgatgatgacaggcttccagattagcggggaaacgtttaaccccgacagactgtatatggtagacatagatggctcaggcaccaccgattttatttatgcccgcaatacttaccttgaactctatgccaatgaaagcggcaatcattttgctgaacctcagcgtattgatctgccggatggggtacgttttgatgatacttgtcggttacaaatagcggatacacaaggattagggactgccagcattattttgacgatcccccatatgaaggtgcagcactggcgattggatatgaccatattcaagccttggctgctgaatgccgtcaataacaatatgggaacagaaaccacgctgtattatcgcagctctgcccagttctggctggatgagaaattacaggcttctgaatccgggatgacggtggtcagctacttaccgttcccggtgcatgtgttgtggcgcacggaagtgctggatgaaatttccggtaaccgattgaccagccattatcattactcacatggtgcctgggatggtctggaacgggagtttcgtggttttgggcgggtgacacaaactgatattgattcacgggcgagtgcgacacaggggacacatgctgaaccaccggcaccttcgcgcacggttaattggtacggcactggcgtacgggaagtcgatattcttctgcccacggaatattggcagggggatcaacaggcatttccccattttaccccacgctttacccgttatgacgaaaaatccggtggtgatatgacggtcacgccgagcgaacaggaagaatactggttacatcgagccttaaaaggacaacgtttacgcagtgagctgtatggggatgatgattctatactggccggtacgccttattcagtggatgaatcccgcacccaagtacgtttgttaccggtgatggtatcggacgtgcctgcggtactggtttcggtggccgaatcccgccaataccgatatgaacgggttgctaccgatccacagtgcagccaaaagatcgtccttaaatctgatgcgttaggatttccgcaggacaatcttgagattgcctattcgagacgtccacagcctgagttctcgccttatccggataccctgcccgaaacacttttcaccagcagtttcgacgaacagcagatgttccttcgtctgacacgccagcgttcttcttatcatcatctgaatcatgatgataatacgtggatcacagggcttatggatacctcacgcagtgacgcacgtatttatcaagccgataaagtgccggacggtggattttcccttgaatggttttctgccacaggtgcaggagcattgttgttgcctgatgccgcagccgattatctgggacatcagcgtgtagcatataccggtccagaagaacaacccgctattcctccgctggtggcatacattgaaaccgcagagtttgatgaacgatcgttggcggcttttgaggaggtgatggatgagcaggagctgacaaaacagctgaatgatgcgggctggaatacggcaaaagtgccgttcagtgaaaagacagatttccatgtctgggtgggacaaaaggaatttacagaatatgccggtgcagacggattctatcggccattggtgcaacgggaaaccaagcttacaggtaaaacgacagtcacgtgggatagccattactgtgttatcaccgcaacagaggatgcggctggcctgcgtatgcaagcgcattacgattatcgatttatggttgcggataacaccacagatgtcaatgataactatcacaccgtgacgtttgatgcactggggagggtaaccagcttccgtttctgggggactgaaaacggtgaaaaacaaggatatacccctgcggaaaatgaaactgtcccctttattgtccccacaacggtggatgatgctctggcattgaaacccggtatacctgttgcagggctgatggtttatgcccctctgagctggatggttcaggccagcttttctaatgatggggagctttatggagagctgaaaccggctgggatcatcactgaagatggttatctcctgtcgcttgcttttcgccgctggcaacaaaataaccctgccgctgccatgccaaagcaagtcaattcacagaacccaccccatgtactgagtgtgatcaccgaccgctatgatgccgatccggaacaacaattacgtcaaacgtttacgtttagtgatggttttgggcgaaccttacaaacagccgtacgccatgaaagtggtgaagcctgggtacgtgatgagtatggagccattgtggctgaaaatcatggcgcgcctgaaacggcgatgacagatttccgttgggcagtttccggacgtacagaatatgacggaaaaggccaagccctgcgtaagtatcaaccgtatttcctgaatagttggcagtacgtcagtgatgacagtgcccggcaggatatatatgccgatacccattactatgatccgttggggcgtgaatatcaggttatcacggccaaaggcgggtttcgtcgatccttattcactccctggtttgtggtgaatgaagatgaaaatgacactgccggtgaaatgacagca

SEQ ID NO: 32 - DNA, 4521 bp, Xenorhabdus bovienii
atgaaacaagattcacaggacatgacagtaacacagctgtccctgcccaaagggggcggtgcgatcagtggcatgggtgacactatcagcaatgcagggccggatgggatggcttcgctttccgtgcctttgcctatctctgccggtcgggggggcgcaccgaatttatccctgaactacagtagcggagcaggaaacgggtcatttggtattggctggcaatccagtaccatggctatcagccgtcgtactcaacatggcgtaccgcaatatcacggcgaagatacttttttatgtccgatgggagaagtgatggcggttgccgtcaatcagagcgggcaacccgatgtgcgtaaaaccgataaactattaggcgggcaactgcctgttacttataccgttacgcgtcatcagcccagaaatattcagcacttcagcaaacttgaatactggcagcccccaacggatgtggaaaccacgcctttttggttaatgtattcacccgatggacaaattcacattttcggaaaaactgagcaggctcagatcgctaacccggcagaggtttcacagattgcccaatggcttttggaagaaaccgtaacaccagcgggagaacacatttattaccagtatcgggcagaagacgatatcggttgtgatgacagcgaaaaaaatgcccaccctaatgccagtgctcaacgttatttgactcaggtgaactacggcaatattacacctgaatccagcctgcttgtgctgaagaatacgccaccggcggataacgaatggctattccatttggtttttgattatggtgaacgagcgcaggaaataaacacggttcctcctttcaaagcaccttcaaacaactggaaaatacggccagaccgtttctcccgctttgaatatggttttgaggtgcgaacccgccgcctgtgtcaacaaattctgatgttccatcgcctgaaatcccttgcaggagaacagattgacggagaagaaatccctgccttggttgcccgtctgcttctcagttatgacctgaacgacagcgtgacaacccttaccgccattcggcaaatggcgtatgaaactgacgcaaccttaatcgctttaccgccactggagtttgactatcagccctttgaggcaaaagtcacgcagaaatggcaggaaatgcctcaattggccggattgaatgcccaacaaccttaccaactcgtcgatctctatggtgaaggtatctccggcatcttgtatcaggacagacccggagcatggtggtatcaggcaccgatccgtcagaaaaacgttgaagatattaacgctgtcacctatagcccaataaaccccttacctaagatccccagccagcaggacagagcaacgttgatggatatcgacggtgatggacatctggattgggtgatcgctggcgcaggtattcaggggcggtacagtatgcagccgaatggagagtggacacactttattcccatttctgcactgccaacagaatattttcatccacaggcacaactggcggatctggtgggggccgggttatctgatttagcgctgattggccccagaagtgtgcgtttatatgccaacgaccgaggaaactggaaagcgggtattaatgttatgccacctgatggtgtgaatttgccgatatttggtggtgatgccagcagtctggtcgcattttctgacatgttgggatcgggacagcagcatttggtggaaattgccgctcagagcgtcaaatgctggccgaatctaggacatggccgttttggtgcggctattttgctgccggggtttagccagccgaatggaacattcaatgctaaccaagtttttctggcagatatcgatggttccggcaccgccgacatcatctatgcacacagtacgtatctggatatttacctgaacgaaagcggcaaccgtttcagtgcacccgttcggcttaatttgccggaaggggtgatgtttgacaatacctgtcagttacaggtgtcggatattcaaggattgggcgctgccagcattgtactgaccgtacctcatatgacaccgcgccattggcgttatgattttactcacaataaaccttggctgctcaatgtcatcaacaacaatcgtggcgcagaaaccacgttgttttaccgtagttctgcccaattctggctggatgaaaaaagtcagatcgaagagctgggaaaatttgcagcgagttatctgcctttccccatacatttgttgtggcgcaatgaggcgctggatgaaattactggtaatcgactgactaaggtcatgaattatgcccacggtgcatgggatggcagagagagagaattttgcggatttggccgtgtaacgcaaattgataccgacgaatttgccaagggaaccacagagaaagcgccggatgaaaatatctatccttcccgtagcataagctggtttgccacgggtttaccagaagtggattctcaacttccggcagaatactggcgtggtgacgatcaggcatttgccggctttacaccgcgcttcactcgttatgaaaaaggtaatgcggggcaagaggggcaggataccccgattaaagaaccgaccgaaacagaagcgtattggcttaaccgcgccatgaaaggccaattactgcgcagtgaagtctatggtgacgacaaaacagaaaaagctaaaattccgtacaccgtcacagaagctcgctgtcaggtcagattaattcccagcaatgacgaagccgcgccgtcgtcttggacgtcgatcattgaaaaccgcagttatcactatgagcgtatcgtcgtcgatccgagttgcaaacaacaggtcgtgctcaaggcggatgaatatggcttcccactggcaaaagtagatatcgcctatccacggcgcaataaaccggcacagaacccttatccggattcgttaccggatactctgttcgccgatagctatgacgaccagcaaaaacagttatatctgacaaaacagcagcagagctattaccacctgacccagcaggatgattgggttctgggtttgacggatagccgatacagcgaagtttatcattatgcgcaaactgacgctcaaagtgacatccccaaggcagggctgatattggaagacctgctgaaagttgacggcctgataggtaaagacaagacttttatctatttagggcagcagcgagtggcttatgtgggaggagatgcagaaaaaccgacacgtcaggtgcgggtggcttatacagaaaccgctgcttttgatgacaatgcgctgcacgcctttgatggcgtgattgcccctgatgaactgacgcaacagttgctggcgggtggatacctgctcgtgccgcagatttctgatgtggcaggcagtagtgaaaaggtatgggtagctcggcagggatacaccgaatacggcagtgctgctcaattctaccggccactcatccagcgcaaaagcttgctgaccggaaaatatacccttagttgggatacgcactattgtgtggtggtaaaaaccgaagatggtgcgggaatgaccacgcaagcgaagtacgattaccgcttcctgcttccggcgcaattgacagatatcaatgacaaccagcacatcgtgacatttaatgcattggggcaggtgacttccagccgtttctggggcacagaaaatggcaaaataagcggttactcgacgccggagagtaaaccgttcacagtacccgataccgtcgaaaaagcccttgccttgcaaccgacgatcccggtttcacagtgcaacatttatgtgccggatagttggatgcggcttctgccccaacagtctctgactggccagctaaaagagggggaaactttgtggaacgcattacaccgggcgggtgtagtaacggaagacggtttgatctgtgaactggcctatcgtcgttggatcaaacgtcaggcaacgtcttcaatgatggccgtgacattacagcaaatcttggctcagactccacgacaacctccgcatgccatgacgatcacgacagatcgttatgacagcgattctcagcagcaacttcggcagtcgatagtattgagtgatggttttggtcgcgtattgcaaagcgcccagcgtcatgaagcaggagaggcatggcagcgtgcagaagatggttctttggttgtcgataataccggtaaacccgttgttgctaataccacaacgcgctgggcagtatccggtcgcacagaatacgacggcaaagggcaggcgatcagagcttacctgccttattatctcaatgattggcgctatgtcagtgatgacagcgcccgggatgacctgtacgccgatacccatttttacgatcctctggggcgtgaatatcaggtaaaaaccgcgaaaggattttggcgtgaaaacatgtttatgccgtggtttgtcgtcaatgaagatgaaaatgacacagcagcacgtttaacatcttaa

SEQ ID NO: 33 - DNA, 4335 bp, Paenibacillus strain DAS1529
atgccacaatctagcaatgccgatatcaagctattgtcgccatcgctgccaaagggcggcggttccatgaagggaatcgaagaaaacatcgcggctcccggctccgacggcatggcacgttgtaatgtgccgctgccggtaacctccggccgctatattactcctgatataagcctgtcctatgcgagcggccacggcaacggcgcttatggaatgggctggacgatgggagtgatgagcattagccggagaacaagccgagggacccccagttatacatccgaagaccagttccttggtccggatggggaggtgcttgttccggaaagcaacgaacaaggggagatcattacccgccacaccgatacggcccaagggataccgttaggcgagacgtttacggttacacgctattttccccggatcgagagcgcttttcatttgctggaatactgggaagcgcaagcaggaagcgcaacagcgtcgttttggcttattcactctgccgatggagtgctgcactgtctgggtaaaactgctcaggcgaggatagccgcccctgacgattccgccaagatcgcagaatggctagtggaggagtccgtctcccccttcggagagcatatttattaccaatacaaagaagaagacaatcaaggcgtgaatctggaggaagacaatcatcaatatggggcgaaccgctatctgaaatcgattcgctatggaaataaggttgcctctccttctctctatgtctggaagggggaaattccggcagacggccaatggctgtattccgttatcctggattatggcgagaacgatacctcagcggatgttcctcccctatacacgccccaaggggagtggctggtgcgcccggaccgtttttcccgctatgactacggatttgaggtccggacttgccgcttgtgccgccaggtcttgatgttccacgtctttaaggagcttggcggggagccggcgctggtgtggcggatgcagttggaatacgacgagaacccggcggcgtccatgctgagcgcggtccggcaattggcttatgaagcagatggggccattcgaagcttgccgccgctggaattcgattatactccatttggcatcgagacaacggccgattggcagccttttctgcctgtgcctgaatgggcggatgaagaacattatcagttggtcgatttgtacggagaaggcataccgggcttattatatcagaacaatgaccactggcattatcgttcgcccgcccggggcgacacaccggacgggatcgcctataacagctggcggccgcttcctcatatccccgtgaactcccggaacgggatgctgatggatctgaatggagacgggtatctggaatggttgcttgcggaacccggggttgcggggcgctatagcatgaacccggataagagctggtccggttttgtgccgctccaggcactgccaacggaattcttccatccgcaggcacagcttgccaatgttaccggatcgggtttaaccgacttggttatgatcggtccgaagagcgtccggttttatgccggagaagaagcgggcttcaagcgcgcatgtgaagtgtggcagcaagtgggcattactttgcctgtggaacgcgtggataaaaaggaactggtggcattcagcgatatgctgggatcgggtcagtctcatctggtgcgcatccggcatgatggcgttacatgctggcctaatctggggaacggcgtgttcggggcgccgttggcccttcacgggtttacggcatcggagcgggaattcaatccggaacgtgtatatcttgtggaccttgatggatccggcgcttccgatatcatttatgcttctcgtgacgctctactcatttaccgaaatctttccggcaatggctttgctgatccggtgcgggttccgctgcctgacggcgtgcggtttgataatctgtgccggctgctgcctgccgatatccgcgggttaggtgtggccagtctggtgctgcatgtaccttacatggccccccgcagttggaaattagatttctttgcggcgaagccgtatttattgcaaacggtcagcaacaatcttggagcttccagctcgttttggtaccgaagctccacccagtattggctggatgagaaacaggcggcctcatcggctgtctccgctttgcccttcccgataaacgtggtatcggatatgcacacggtggacgaaatcagcggccgcaccaggactcagaagtatacttaccgccatggcgtgtatgaccggaccgaaaaggaatttgccggattcggccgcattgacacatgggaagaggagcgggattccgaaggaaccctgagcgtcagcactccgcccgtgctgacgcggacctggtatcataccgggcaaaagcaggatgaggagcgtgccgtgcagcaatattggcaaggcgaccctgcggcttttcaggttaaacccgtccggcttactcgattcgatgcggcagcggcccaggatctgccgctagattctaataatgggcagcaagaatactggctgtaccgatcattacaagggatgccgctgcggactgagatttttgcgggagatgttggcgggtcgcctccttatcaggtagagagcttccgttatcaagtgcgcttggtgcagagcatcgattcggaatgtgttgccttgcccatgcagttggagcagcttacgtacaactatgagcaaatcgcctctgatccgcagtgttcacagcagatacagcaatggttcgacgaatacggcgtggcggcacagagtgtaacaatccaatatccgcgccgggcacagccggaggacaatccgtaccctcgcacgctgccggataccagctggagcagcagttatgattcgcagcaaatgctgctgcggttgaccaggcaaaggcaaaaagcgtaccaccttgcagatcctgaaggctggcgcttgaatattccccatcagacacgcctggatgccttcatttattctgctgacagcgtgcccgccgaaggaataagcgccgagctgctggaggtggacggcacgttacgatcttcggcgctggaacaggcttatggcggccagtcagagatcatctatgcgggcgggggcgaaccggatttgcgagccctggtccattacaccagaagcgcggttcttgatgaagactgtttacaagcctatgaaggcgtactgagcgatagccaattgaactcgcttcttgcctcttccggctatcaacgaagcgcaagaatattgggttcgggcgatgaagtggatatttttgtcgcggaacaaggatttacccgttatgcggatgaaccgaattttttccgtattctggggcaacaatcctctctcttgtccggggaacaagtattaacatgggatgataatttctgtgcggttacatccatcgaagacgcgcttggcaatcaaattcagattgcatatgattaccgctttgtggaggccatccagattaccgatacgaataataatgtgaatcaggtcgccctggatgctctcggccgggtcgtatacagccggacctggggcacggaggaagggataaagaccggcttccgcccggaggtggaattcgcgacgcccgagacaatggagcaggcgcttgccctggcatctcccttgccggttgcatcctgctgtgtatatgatgcgcatagctggatgggaacgataactcttgcacaactgtcagagcttgttccagatagtgaaaagcaatggtcgttcttgatagacaatcgcttgattatgccggacggcagaatcagatcccgcggtcgggatccatggtcgcttcaccggctattgccgcctgctgtgggcgaattgctgagcgaggcggaccgtaaaccgccgcatacggtaattttggcagcagatcgttacccggatgacccatcccagcaaattcaggcgagcatcgtgtttagcgatggctttgggcgtacgatacaaactgctaaaagagaagatacccgatgggcgattgcggaacgggtggactatgacggaaccggagccgtaatccgcagctttcagcctttttatcttgacgactggaattatgtgggcgaagaggctgtcagcagctctatgtacgcaacgatctattattatgatgctctggcacgacaattaaggatggtcaacgctaaaggatatgagaggagaactgctttttacccatggtttacagtaaacgaagatgaaaatgataccatggactcatcattatttgcttcaccgcctgcgcggtga

SEQ ID NO: 34 - DNA, 3132 bp, Photorhabdus luminescens
atgagtccgtctgagactactctttatactcaaaccccaacagtcagcgtgttagataatcgcggtctgtccattcgtgatattggttttcaccgtattgtaatcgggggggatactgacacccgcgtcacccgtcaccagtatgatgcccgtggacacctgaactacagtattgacccacgcttgtatgatgcaaagcaggctgataactcagtaaagcctaattttgtctggcagcatgatctggccggtcatgccctgcggacagagagtgtcgatgctggtcgtactgttgcattgaatgatattgaaggtcgttcggtaatgacaatgaatgcgaccggtgttcgtcagacccgtcgctatgaaggcaacaccttgcccggtcgcttgttatctgtgagcgagcaagttttcaaccaagagagtgctaaagtgacagagcgctttatctgggctgggaatacaacctcggagaaagagtataacctctccggtctgtgtatacgccactacgacacagcgggagtgacccggttgatgagtcagtcactggcgggcgccatgctatcccaatctcaccaattgctggcggaagggcaggaggctaactggagcggtgacgacgaaactgtctggcagggaatgctggcaagtgaggtctatacgacacaaagtaccactaatgccatcggggctttactgacccaaaccgatgcgaaaggcaatattcagcgtctggcttatgacattgccggtcagttaaaagggagttggttgacggtgaaaggccagagtgaacaggtgattgttaagtccctgagctggtcagccgcaggtcataaattgcgtgaagagcacggtaacggcgtggttacggagtacagttatgagccggaaactcaacgtctgataggtatcaccacccggcgtgccgaagggagtcaatcaggagccagagtattgcaggatctacgctataagtatgatccggtggggaatgttatcagtatccataatgatgccgaagctacccgcttttggcgtaatcagaaagtggagccggagaatcgctatgtttatgattctctgtatcagcttatgagtgcgacagggcgtgaaatggctaatatcggtcagcaaagcaaccaacttccctcacccgttatacctgttcctactgacgacagcacttataccaattaccttcgtacctatacttatgaccgtggcggtaatttggttcaaatccgacacagttcacccgcgactcaaaatagttacaccacagatatcaccgtttcaagccgcagtaaccgggcggtattgagtacattaacgacagatccaacccgagtggatgcgctatttgattccggcggtcatcagaagatgttaataccggggcaaaatctggattggaatattcggggtgaattgcaacgagtcacaccggtgagccgtgaaaatagcagtgacagtgaatggtatcgctatagcagtgatggcatgcggctgctaaaagtgagtgaacagcagacgggcaacagtactcaagtacaacgggtgacttatctgccgggattagagctacggacaactggggttgcagataaaacaaccgaagatttgcaggtgattacggtaggtgaagcgggtcgcgcacaggtaagggtattgcactgggaaagtggtaagccgacagatattgacaacaatcaggtgcgctacagctacgataatctgcttggctccagccagcttgaactggatagcgaagggcagattctcagtcaggaagagtattatccgtatggcggtacggcgatatgggcggcgagaaatcagacagaagccagctacaaatttattcgttactccggtaaagagcgggatgccactggattgtattattacggctaccgttattatcaaccttgggtgggtcgatggttgagtgctgatccggcgggaaccgtggatgggctgaatttgtaccgaatggtgaggaataaccccatcacattgactgaccatgacggattagcaccgtctccaaatagaaatcgaaatacattttggtttgcttcatttttgtttcgtaaacctgatgagggaatgtccgcgtcaatgagacggggacaaaaaattggcagagccattgccggcgggattgcgattggcggtcttgcggctaccattgccgctacggctggcgcggctatccccgtcattctgggggttgcggccgtaggcgcggggattggcgcgttgatgggatataacgtcggtagcctgctggaaaaaggcggggcattacttgctcgactcgtacaggggaaatcgacgttagtacagtcggcggctggcgcggctgccggagcgagttcagccgcggcttatggcgcacgggcacaaggtgtcggtgttgcatcagccgccggggcggtaacaggggctgtgggatcatggataaataatgctgatcgggggattggcggcgctattggggccgggagtgcggtaggcaccattgatactatgttagggactgcctctacccttacccatgaagtcggggcagcggcgggtggggcggcgggtgggatgatcaccggtacgcaagggagtactcgggcaggtatccatgccggtattggcacctattatggctcctggattggttttggtttagatgtcgctagtaaccccgccggacatttagcgaattacgcagtgggttatgccgctggtttgggtgctgaaatggctgtcaacagaataatgggtggtggatttttgagtaggctcttaggccgggttgtcagcccatatgccgccggtttagccagacaattagtacatttcagtgtcgccagacctgtctttgagccgatatttagtgttctcggcgggcttgtcggtggtattggaactggcctgcacagagtgatgggaagagagagttggatttccagagcgttaagtgctgccggtagtggtatagatcatgtcgctggcatgattggtaatcagatcagaggcagggtcttgaccacaaccgggatcgctaatgcgatagactatggcaccagtgctgtgggagccgcacgacgagttttttctttgtaa

SEQ ID NO: 35 - DNA, 2745 bp, Photorhabdus luminescens
atgagcagttacaattctgcaattgaccaaaagaccccctcgattaaggtattagataacaggaaattaaatgtacgtactttagaatatctacgcactcaagctgacgaaaacagtgatgaattaattacgttctatgagttcaatattccgggatttcaggtaaaaagcaccgatcctcgtaaaaataaaaaccagagcggcccaaatttcattcgtgtctttaatcttgccggtcaagttttacgtgaagaaagtgttgatgccggtcggactattaccctcaatgatattgaaagtcgcccggtgttgatcatcaatgcaaccggtgtccgccaaaaccatcgttatgaagataacacccttcccggtcgtctgctcgctatcaccgaacaagtacaggcaggagagaaaacgaccgaacgtcttatctgggccggcaatacgccgcaagaaaaagattacaacctcgccggtcagtgtgtccgccattacgataccgcgggacttactcaactcaatagcctttctctggctggcgtcgtgctatcacaatctcaacaactgcttaccgataaccaggatgccgactggacaggtgaagaccagagcctctggcaacaaaaactgagtagtgatgtctatatcacccaaagtaacactgatgccaccggggctttactgacccagaccgatgccaaaggcaacattcagcggctggcctatgatgtggccgggcagctaaaagggagttggttaacactcaaaggtcaggcggaacaggtgattatcaaatcgctaacctactccgccgccgggcaaaaattacgtgaagagcacggtaacgggattgtcactgaatacagctacgaaccggaaacccaacggcttatcggcattaccactcgccgtccatcagacgccaaggtgttgcaagacctacgctatcaatatgacccagtaggcaatgtcattaatatccgtaatgatgcggaagccactcgcttttggcgcaatcagaaagtagccccggagaatagctatacctacgattccctgtatcagcttatcagcgccaccgggcgcgaaatggccaatatcggtcagcaaaacaaccaacttccctcccctgcgctaccttctgacaacaatacctacactaactatactcgcagctacagctatgatcacagtggtaatctgacgcaaattcggcacagctcgccagctacccagaacaactacaccgtggctatcaccctctcaaaccgcagcaatcggggtgttctcagtacgctaaccaccgatccaaatcaagtggatacgttgtttgatgccggtggtcaccaaaccagtttattacccggacagacacttatctggacaccacgaggagagttaaagcaggttaataatggcccgggaaatgagtggtaccgctacgacagcaacggcatgagacaactgaaagtgagtgaacagccaacccagaatactacgcagcaacaacgggtaatctatttgccgggactggagctacgcacaacccagagcaacgccacaacaacggaagagttacacgttatcacactcggtgaagccggtcgcgcacaggtacgggtgttgcactgggagagcggtaagccagaagatgtcaacaataatcaactacgttacagctacgataatctgatcggctccagccagcttgaactggacaaccaaggacaaattatcagcgaggaagagtattatccatttggcgggacagcgctgtgggcagcaaacagccaaacagaagccagctataaaacgattcgctattccggcaaagaacgagatgccaccgggttgtattattacggttatcgttattaccaaccgtgggcgggcagatggttaagcgcggacccggcaggaaccattgatgggctgaatctataccgaatggtaagaaataatcctgtgagtttacaagatgaaaatggattagcgccagaaaaagggaaatataccaaagaggtaaatttctttgatgaattaaaattcaaattggcagccaaaagttcacatgttgtcaaatggaacgagaaagagagcagttatacaaaaaataaatcattgaaagtggttcgtgtcggtgattccgatccgtcgggttatttgctaagccacgaagagttactaaaaggtatagaaaaaagtcaaatcatatatagccgacttgaagaaaacagctccctttcagaaaaatcaaaaacgaatctttctttaggatctgaaatatccggttatatggcaagaaccatacaagatacgatatcagaatatgccgaagagcataaatatagaagtaatcaccctgatttttattcagaaaccgatttctttgcgttaatggataaaagtgaaaaaaatgattattccggtgaaagaaaaatttatgcggcaatggaggttaaggtttatcatgatttaaaaaataaacaatcagaattacatgtcaactatgcattggcccatccctatacgcaattgagtaatgaagaaagagcgctgttgcaagaaacagaacccgctattgcaatagatagagaatataatttcaaaggtgttggcaaattcctgacaatgaaagcaattaaaaaatcattgaaaggacataaaattaataggatatcaacagaggctattaatattcgctctgcggctatcgctgagaatttaggaatgcggagaacttca

SEQ ID NO: 36 - DNA, 2883 bp, Photorhabdus luminescens
atgaaaaacattgatcccaaactttatcaaaaaacccctactgtcagcgtttacgataaccgtggtctgataatccgtaacatcgattttcatcgtactaccgcaaatggtgatcccgatacccgtattacccgccatcaatacgatattcacggacacctaaatcaaagcatcgatccgcgcctatatgaagccaagcaaaccaacaatacgatcaaacccaattttctttggcagtatgatttgaccggtaatcccctatgtacagagagcattgatgcaggtcgcactgtcaccttgaatgatattgaaggccgtccgctactaacggtgactgcaacaggggttatacaaactcgacaatatgaaacttcttccctgcccggtcgtctgttatctgttgccgaacaaacacccgaggaaaaaacatcccgtatcaccgaacgcctgatttgggctggcaataccgaagcagagaaagaccataaccttgccggccagtgcgtgcgtcactatgacacggcgggagttacccggttagagagtttatcactgaccggtactgttttatctcaatccagccaactattgatcgacactcaagaggcaaactggacaggtgataacgaaaccgtctggcaaaacatgctggctgatgacatctacacaaccctgagcaccttcgatgccaccggtgctttactgactcagaccgatgcgaaagggaacattcagagactggcttatgatgtggccgggcagctaaacgggagctggctaacactcaaaggccagacggaacaagtgattatcaaatccctgacctactccgccgccggacaaaaattacgtgaggaacacggcaatgatgttatcaccgaatacagttatgaaccggaaacccaacggctgatcggtatcaaaacccgccgtccgtcagacactaaagtgctacaagacctgcgctatgaatatgacccggtaggcaatgtcatcagcatccgtaatgacgcggaagccacccgcttttggcacaatcagaaagtgatgccggaaaacacttatacctacgattccctgtatcagcttatcagcgccaccgggcgcgaaatggcgaatataggtcaacaaagtcaccaatttccctcacccgctctaccttctgataacaacacctataccaactatacccgtacttatacttatgaccgtggcggcaatctgaccaaaatccagcacagttcaccggcgacgcaaaacaactacaccaccaatatcacggtttcaaatcgcagcaaccgcgcagtactcagcacattgaccgaagatccggcgcaagtagatgctttgtttgatgcaggcggacatcagaacaccttgatatcaggacaaaacctgaactggaatactcgtggtgaactgcaacaagtaacactggttaaacgggacaagggcgccaatgatgatcgggaatggtatcgttatagcggtgacggaagaaggatgttaaaaatcaatgaacagcaggccagcaacaacgctcaaacacaacgtgtgacttatttgccgaacttagaacttcgtctaacacaaaacagcacggccacaaccgaagatttgcaagttatcaccgtaggcgaagcgggccgggcacaggtacgagtattacattgggagagcggtaaaccggaagatatcgacaataatcagttgcgttatagttacgataatcttatcggttccagtcaacttgaattagatagcgaaggacaaattatcagtgaagaagaatattatccctatggtggaacagcattatgggccgccaggaatcagacagaagccagttataaaactatccgttattcaggcaaagagcgggatgccaccgggctatattactacggctatcggtattaccaaccgtggataggacggtggttaagctccgatccggcaggaacaatcgatgggctgaatttatatcggatggtgaggaataatccagttaccctccttgatcctgatggattaatgccaacaattgcagaacgcatagcagcactaaaaaaaaataaagtaacagactcagcgccttcgccagcaaatgccacaaacgtagcgataaacatccgcccgcctgtagcaccaaaacctagcttaccgaaagcatcaacgagtagccaaccaaccacacaccctatcggagctgcaaacataaaaccaacgacgtctgggtcatctattgttgctccattgagtccagtaggaaataaatctacttctgaaatctctctgccagaaagcgctcaaagcagttcttcaagcactacctcgacaaatctacagaaaaaatcatttactttatatagagcagataacagatcctttgaagaaatgcaaagtaaattccctgaaggatttaaagcctggactcctctagacactaagatggcaaggcaatttgctagtatctttattggtcagaaagatacatctaatttacctaaagaaacagtcaagaacataagcacatggggagcaaagccaaaactaaaagatctctcaaattacataaaatataccaaggacaaatctacagtatgggtttctactgcaattaatactgaagcaggtggacaaagctcaggggctccactccataaaattgatatggatctctacgagtttgccattgatggacaaaaactaaatccactaccggagggtagaactaaaaacatggtaccttcccttttactcgacaccccacaaatagagacatcatccatcattgcacttaatcatggaccggtaaatgatgcagaaatttcatttctgacaacaattccgcttaaaaatgtaaaacctcataagagataa

SEQ ID NO: 37 - DNA, 2850 bp, Photorhabdus luminescens
atgaaaaacattgacccaaaactttatcaacatacgcccaccgttaacgtctacgataaccgtggcctgaccattcgtaacatcgactttcaccgtgacgtcgcgggaggcgatacagatactcgtattacccgccaccaatatgatacccgaggacacttgagccaaagcattgatccacggctgtatgacgccaaacaaaccaataactcgacaaaccccaacttcctctggcaatacaatctcaccggcgacactttgcggacagaaagtgtcgatgccggccgtaccgtagccctcaatgatattgaaggccgtcaagtgttgattgtaaccgcaaccggcgccattcagacccgacaatatgaagccaataccctgcccggtcgtctattatccgtaagtgaacaagcccccggagaacagactccccgcgttactgagcattttatttgggctggtaatacacaggcggagaaagatcataatcttgccggccagtatgtgcgccactacgacacagcaggagtgacgcaactggaaagcctgtcattgacagaaaacatcttatctcaatcccgtcagttattagccgacggtcaggaagcagactggacaggtaacgatgaaaccctctggcagaccaaactcaatagcgaaacttacacgacacaaagcacctttgatgctaccggcgctttgctgacccaaaccgatgcaaaaggcaacatgcaacgtctggcttacaacgtggcaggacaattacaaggtagctggctgacattgaaaaaccaaagtgagcaagtcattgtcaaatccctgacctattccgccgcaggccagaaattgcgtgaagaacacggtaatggcgttatcactgaatacagctatgaaccggaaactctacgattgatcggtaccactactcgccgtcaatcagatagcaaggtgttacaagatctacgctatgaacatgatcctgtagggaatattattagtgtccgtaatgatgcagaagccacccgcttctggcgcaatcagaaaatagtccctgaaaatacctacacctacgattccctgtatcagcttatcagtgcaacaggacgtgagatggctaacatcggccagcaaagcaaccaacttccttcgccaatcatccctcttcctactgatgaaaactcatataccaactatactcgcagctataattacgatcgcggcggcaatttggttcaaatccggcacagttcccccgccgcccaaaataactacaccacagatatcaccgtttcgaatcgcagtaaccgggcagtgctgagttcgctaacctcagacccaacacaggtggaggcactgtttgatgccggcggacatcaaacaaaattgttaccggggcaagagctgagttggaatacacgaggtgaactaaaacaggtaacgccagtcagtcgcgagagcgccagcgatcgggaatggtatcgttacggcaacgacggcatgcgacggttaaaagtcagtgagcaacagactggcaacagcacgcagcagcaacgagtaacttatcttcccgatctggagctacgtacaacacaaaatgggactactacatcagaagacctgcatgctattaccgtgggagcagcaggccacgcacaagtgcgagttctacactgggaaactacgccaccagccggtatcaataacaatcagcttcgctatagctatgataatttgattggttccagtcaacttgaactggataacgcaggacaaattatcagtcaggaagagtattatccatttggcggcacagcattatgggcagcaagaaaccaaatagaagccagctacaaaatcctccgttactcaggtaaagaacgcgatgctaccgggctctattattacggctaccgctattatcagccgtgggttggtaggtggttaagcgccgatccggctggaacaatcgatggactgaatctataccggatggtgagaaataatccgtcaacactggttgatatttctgggcttgcacctacgaaatacaatattcccggatttgactttgatgtagaaatagatgagcaaaaaagatctaaattaaaaccaacgttgataagaatcaaagatgaatttttacattatggtcctgtagataagctgttagaagaaaaaaaacccggcctcaatgtaccagaggagctatttgatagaggtccatccgagaatggagtgtcaacattaactttcaaaaaagacctaccgataagttgtattagcaacacagaatatacccttgatatcttatacaacaaacatgagactaaaccattcccttacgaaaacgaagcaacagttggcgcagatctgggagtaataatgtccgtggagtttggaaataaatcaataggtaatgcctctgacgaagatttaaaagaagaacatctcccattaggaaaatccacaatggataaaacagacctgccagatttaaaacaagggctaatgatcgcggagaagataaaaagtggaaaaggggcatatccttttcattttggtgctgcaatagctgttgtatatggtgaggataaaaaagtagccgcttcaattctgacagatttatctgaacctaaaagagacgaaggcgagtatttgcaaagtacgagaaaggtaagcgcaatgtttatcacaaacgtcaatgaatttcgcggccatgattacccaaaaagtaaatatagtatcggattagttacagctgaaaaacgtcagccagtaataagcaaaaaacgtgcaaacccggaagaggccccttcatcatccagaaataaaaaattgcatgtacattaa

SEQ ID NO: 38 - DNA, 2817 bp, Photorhabdus luminescens
atggaaaacattgacccaaaactttatcaccatacgcctaccgtcagtgttcacgataaccgtggactagctatccgtaatattagttttcaccgcactaccgcagaagcaaataccgatacccgtattacccgccatcaatataatgccggcggatatttgaaccaaagcattgatcctcgcctgtatgacgccaaacagactaacaacgctgtacaaccgaattttatctggcgacataatttgaccggcaatatcctgcgaacagagagcgtcgatgccggtcggacgattaccctcaacgatattgaaggccgcccggtgttgaccatcaatgcagccggtgtccggcaaaaccatcgctacgaagataacaccctgcccggtcgcctgctcgctatcagcgaacaaggacaggcagaagagaaaacgaccgagcgccttatctgggccggcaatacgccgcaagaaaaagaccacaaccttgccggtcagtgcgtccgccattacgataccgcaggactcactcaactcaacagccttgccctgaccggcgccgttctatcacaatctcaacaactgcttaccgataaccaggatgccgactggacaggtgaagaccagagcctctggcaacaaaaactgagtagtgatgtctatatcacccaaagtaacactgatgccaccggggctttactgacccagaccgatgccaaaggcaacattcagcggctggcctatgatgtggccgggcagctaaaagggagttggttaacactcaaaggtcaggcggaacaggtgattatcaaatcgctaacctactccgccgccgggcaaaaattacgtgaagagcacggtaacgggattgtcactgaatacagctacgaaccggaaacccaacggcttatcggcattaccactcgccgtccatcagacgccaaggtgttgcaagacctacgctatcaatatgacccagtaggcaatgtcattagtatccgtaatgatgcggaagccactcgcttttggcgcaatcagaaagtagccccggagaatagctatacctacgattccctgtatcagcttatcagcgccaccgggcgcgagatggccaatatcggtcagcaaagcaaccaacttccctctccggcgctaccttctgataacaatacctacaccaactatactcgcacttatacttatgaccgtggcggcaatttgacgaaaattcagcatagttcaccagccgcgcaaaataactacacgacggatataacggtttcaaatcgcagcaaccgcgcggtactcagcacattgaccgcagatccaactcaagtcgatgccttatttgatgcgggaggccatcaaaccagcttgttatccggccaagttctaacttggacaccgcgaggcgaattgaaacaagccaacaatagcgcaggaaatgagtggtatcgctacgatagcaacggcatacgccagctaaaagtgaatgaacaacaaactcagaatatcccgcaacaacaaagggtaacttatctaccggggctggaaatacgtacaacccagaacaacgccacaacaacagaagagttacacgttatcacactcggtaaagccggccgcgcgcaagtccgagtattgcattgggagagcggtaaaccagaagatattaataacaatcagcttcgttacagctacgataatcttattggctccagccaacttcaattagatagcgacggacaaattatcagtgaagaagaatattatccatttggtggtacagcgctgtgggcggcaaggaatcaaaccgaagccagctataaaaccattcgttattctggtaaagagcgggatgttaccgggctgtattattatggctaccgttattaccaaccgtgggcgggcagatggttaggtgcagacccggcaggaaccattgatggactgaatttatatcgcatggtgagaaataacccggtgacgcaatttgatgttcagggattatcaccggccaacagaacagaagaagcgataataaaacagggttcctttacgggaatggaagaagctgtttataaaaaaatggctaaacctcaaactttcaaacgccaaagagctatcgctgcccaaacagagcaagaagcccatgaatcattgaccaacaaccctagtgtagatattagcccaattaaaaactacaccacagatagctcacaaattaatgccgcgataagggaaaatcgtattacgccagcagtggaaagtttagacgccacattatcttccctacaagatagacaaatgagggtaacttatcgggtgatgacctatgtagataattccacgccatcgccttggcactcgccacaggaaggaaatagtattaatgttggtgatatcgtttcggataacgcttatttatcaacatcggcccatcgtggttttctgaattttgttcacaaaaaagaaaccagtgaaactcgatacgtcaagatggcatttttaacgaatgcgggtgtcaatgtcccagcagcatctatgtataataatgctggcgaggagcaagtatttaaaatggatttaaacgattcaagaaaaagccttgctgaaaaattaaaactaagagtcagtggaccacaatcgggacaagcggaaatattactacctagggaaacacagttcgaagttgtttcaatgaaacatcaaggcagagatacctatgtattattgcaagatattaaccaatccgcagccactcatagaaatgtacgtaacacttacaccggtaatttcaaatcatccagtgcaaattaa

SEQ ID NO: 39 - DNA, 3048 bp, Xenorhabdus nematophilus
atgaagaatttcgttcacagcaatacgccatccgtcaccgtactggacaaccgtggtcagacagtacgcgaaatagcctggtatcggcaccccgatacacctcaggtaaccgatgaacgcatcaccggttatcaatatgatgctcaaggatctctgactcagagtattgatccgcgattttatgaacgccagcagacagcgagtgacaagaacgccattacacccaatcttattctcttgtcatcactcagtaagaaggcattgcgtacgcaaagtgtggatgccggaacccgtgtcgccctgcatgatgttgccgggcgtcccgttttagctgtcagcgccaatggcgttagccgaacgtttcagtatgaaagtgataaccttccgggacgattgctaacgattaccgagcaggtaaaaggagagaacgcctgtatcacggagcgattgatctggtcaggaaatacgccggcagaaaaaggcaataatctggccggccagtgcgtggtccattatgatcccaccggaatgaatcaaaccaacagcatatcgttaaccagcatacccttgtccatcacacagcaattactgaaagatgacagcgaagccgattggcacggtatggatgaatctggctggaaaaacgcgctggcgccggaaagcttcacttctgtcagcacaacggatgctaccggcacggtattaacgagtacagatgctgccggaaacaagcaacgtatcgcctatgatgtggccggtctgcttcaaggcagttggttggcgctgaaggggaaacaagaacaagttatcgtgaaatccctgacctattcggctgccagccagaagctacgggaggaacatggtaacgggatagtgactacatatacctatgaacccgagacgcaacgagttattggcataaaaacagaacgtccttccggtcatgccgctggggagaaaattttacaaaacctgcgttatgaatatgatcctgtcggaaatgtgctgaaatcaactaatgatgctgaaattacccgcttttggcgcaaccagaaaattgtaccggaaaatacttacacctatgacagcctgtaccagctggtttccgtcactgggcgtgaaatggcgaatattggccgacaaaaaaaccagttacccatccccgctctgattgataacaatacttatacgaattactctcgcacttacgactatgatcgtgggggaaatctgaccagaattcgccataattcaccgatcaccggtaataactatacaacgaacatgaccgtttcagatcacagcaaccgggctgtactggaagagctggcgcaagatcccactcaggtggatatgttgttcacccccggcgggcatcagacccggcttgttcccggtcaggatcttttctggacaccccgtgacgaattgcaacaagtgatattggtcaatagggaaaatacgacgcctgatcaggaattctaccgttatgatgcagacagtcagcgtgtcattaagactcatattcagaagacaggtaacagtgagcaaatacagcgaacattatatttgccagagctggaatggcgcacgacatatagcggcaatacattaaaagagtttttgcaggtcatcactgtcggtgaatcgggtcaggcacaagtgcgggtgctgcattgggaaacaggcaaaccggcggatatcagcaatgatcagctgcgctacagttatggcaacctgattggcagtagcgggctggaattggacagtgacgggcagatcattagtcaggaagaatattacccctatgggggaaccgccgtgtgggcagcccgaagtcagtcagaagctgattacaaaaccgtgcgttattctggcaaagagcgggatgcaacagggttgtattactacggttatcgttattatcaatcgtggacagggcgatggttgagtgtagatcctgccggtgaggtcgatggtctcaatttgttccgaatgtgcaggaataaccccatcgttttttctgattctgatggtcgtttccccggtcagggtgtccttgcctggatagggaaaaaagcgtatcgaaaggcagtcaacatcacgacagaacacctgcttgaacaaggcgcttcctttgatacgttcttgaaattaaaccgaggattgcgaacgtttgttttgggtgtgggggtagcaagtctgggggtgaaggcggccacgattgcaggagcgtcgccttgggggattgtcggggctgccattggtggttttgtctccggggcggtgatggggtttttcgcgaacaacatctcagaaaaaattggggaagttttaagttatctgacgcgtaaacgttctgttcctgttcaggttggcgcttttgttgtcacatcgcttgtgacgtctgcactatttaacagctcttcgacaggtaccgccatttccgcagcaacagcggtcaccgttggaggattaatggctttagccggagagcataacacgggcatggctatcagtattgccacacccgccggacaaggtacgctggatacgctcaggcccggtaatgtcagcgcgccagagcggttaggggcactatcaggcgcaattattggcggcatattacttggccgccatcagggaagttctgagctgggtgaacgggcagcgattggtgctatgtatggtgctcgatggggaaggatcattggtaatctatgggatggcccttatcggtttatcggcaggttactgctcagaagaggcattagctctgccatttcccacgctgtcagttccaggagctggtttggccgaatgataggagaaagtgtcgggagaaatatttctgaagtattattaccttatagccgtacacccggtgaatgggttggtgcagccattggcgggacagccgcggccgctcatcatgccgttggaggggaagttgccaatgccgctagccgggttacctggagcggctttaagcgggcttttaataacttcttctttaacgcctctgcacgtcataatgaatccgaagca

SEQ ID NO: 40 - DNA, 2889 bp, Xenorhabdus bovienii
atgaatgtttttaatccaactttatatgccggtacaccgactgtcaccgtcatggacaatcgagggctgtcagtgcgggatattgcttatcaccgtacaacagcaggagagcaggctgacactcgcatcacccgccatcaatacagtccccataattttttaatcgagagcattgatccacgcctttttgatttgcaatctcagagcaccataaaacctaatttcacctactgtcctgccttgaagggtgatgtcctacggacagagagtgtggatgccggacaaactgtcattttgagtgacatcgaaggtcgtccgttactgaatatcagtgcgatgggtgtcgtcaaacactggcaatatgaagagagtacattgccggggcgcttgctcgctgtcagtgaacggaagaatgaggcttcaacaccccaaattattgaacggtttatttggtcgggaaatagcccatcagaaaaagatcacaatttggcgggaaaatatcttcgtcattatgataccgccggattaaaccagcttaatgctgtgtctctgaccagcgtggatctctcacaatcccgtcagttattgcaggatgatgtcacagcagattggagcggaagtgacgaatcccagtggaagacgcgactgagtaacgacatattcacaaccgaaatcaccgctgatgcggttggcaatttcttgactcagaatgatgccaaaagcaaccagcaacgattgtcctatgatgtggcagggcagttaaaggcaagctggctgacgataaaaggccagaatgagcaggtgatagttaactccctgacttactccgccgcagggcagaaactgcgtgaagagcagggtaacggcgttgtcactgaatactcctatgaagcacaaacctggcgtttgataggtgtaacggcttaccgtcagtcagataaaaaaagattgcaggatcttgtctataactatgatccggtcggtaatctcctgaatattcgcaataatgcagaggcaacccgtttctggcgtaatcagatagtagaaccagagaaccactatgcttatgactcgctttatcaactcatcagtgctagtggtcgagaaatcgccagtatcggtcagcagggcagccggctgcctgtaccgattattcctcttcctgccaatgacgatgtttatactcgctacacccgcacatatcactatgatcgcggtggaaatctctgccagatccggcattgcgctcctgctacagataataagtacaccacaaagatcaccgtatcgaatcgtagtaatcgtgcagtatgggataccttgaccacagatcccgccaaagtggataccctgtttgatcatggagggcatcaacttcaactccagtcaggccagactttatgttggaactatcggggtgaactacagcaaataacaaagatacagcgtgacgaaaaacccgcagataaagagcggtatcgctatggtgttggggctgcgcgggtcgtgaaaatcagcacacagcaggcggggggaagcagccatgtgcagcgtgttgtttatctgccggggttggaactacgcacaactcagcatgatgcgacattaatcgaagacttacaggtgattatcatgggtgaagcaggacgtgctcaggtacgcgtacttcattgggaaataccaccaccggataatcttaacaatgactcactgcgttacagctacgatagtttgatgggttccagtcagcttgaattggatggagcagggcagattattacgcaggaagaatactacccctatggaggtacagcaatatgggcggcaagaaaccagaccgaagccaattacaaaaccattcgctactccggcaaagagcgtgatgcgacggggctttattactacgggcaccgttattatcagccgtggctagggcgctggttgagcgcagatcccgccggaaccgtggacggactgaatctatatcgaatggtgaggaataacccgattacttaccgggatgcagatgggcttgcgccgataggcgataagatcagcgaagggatttatgagcctgagttgcgagttggtcttgaacgagatgacccaaatgtcagagattatgaccgggtttatcctgatacggccaagacagagatgatcgaagcaactgcgaccacaattgctcccagtcaaatgttatcggcgcatgcttttgcatctgtacctatattgacagatttgtttaatcctcaaacagcaaggctttctcaaaagacaacggatattgtattaaacacacaaggtggaggcgatttaatctttactggcatgaatattaaaggtaagggaaaagaatttaatgcattaaaaatcgttgatacttatggcggagaaatgcctgatagcaaaaccgctatttcagcatattggcttccgcaaggtgggtatactgatattccgatacatccgactggaatacaaaagtatttgtttacgcctgcgtttagtggttgcactctggcagtagataagcttaacgaaaatacattacgggcgtatcacgtcgaaggaagtaaggaagatgctcaatataataatttagcagttgcagcgcacggagagggtttggtcatggctatggaatttcctgactatggatttcatacagacaaaacagggcaaagactaaggaacacacagggatttgcgtttatgtcctacaatcaatcccagaaaaaatgggaaattcattatcaaaggcaagcattgacatcaaacaccggtatcatgaatgttagtgctaaaaacaagattcgattgaatgcccccagtcatgtaaaaaatagctcaatcaaaggaactgaaataatgacgacacatttttaa

SEQ ID NO: 41 - DNA, 2862 bp, Paenibacillus strain DAS1529
atgaaaatgataccgtggactcaccattatttgcttcaccgcctgcgcggtgagatggaggttaaacctatgaacacaacgtccatatataggggcacgcctacgatttcagttgtggataaccggaacttggagattcgcattcttcagtataaccgtatcgcggctgaagatccggcagatgagtgtatcctgcggaacacgtatacgccgttaagctatcttggcagcagcatggatccccgtttgttctcgcaatatcaggatgatcgcggaacaccgccgaatatacgaaccatggcttccctgagaggcgaagcgctgtgttcggaaagtgtggatgccggccgcaaggcggagctttttgatatcgaggggcggcccgtctggcttatcgatgccaacggcacagagacgactctcgaatatgatgtcttaggcaggccaacagccgtattcgagcaacaggaaggtacggactccccccagtgcagggagcggtttatttatggtgagaaggaggcggatgcccaggccaacaatttgcgcggacaactggttcgccactacgataccgcgggccggatacagaccgacagcatctccttggctggactgccgttgcgccaaagccgtcaactgctgaaaaattgggatgaacctggcgactggagtatggatgaggaaagcgcctgggcctcgttgctggctgccgaagcttatgatacgagctggcggtatgacgcgcaggacagggtgctcgcccaaaccgacgccaaagggaatctccagcaactgacttacaatgacgccggccagccgcaggcggtcagcctcaagctgcaaggccaagcggagcaacggatttggaaccggatcgagtacaacgcggcgggtcaagtggatctcgccgaagccgggaatggaatcgtaacggaatatacttacgaggaaagcacgcagcggttaatccgaaaaaaagattcccgcggactgtcctccggggaaagagaagtgctgcaggattatcgttatgaatatgatccggtaggcaatatcctttctatttacaatgaagcggagccggttcgttatttccgcaatcaggccgttgctccgaaaaggcaatatgcctacgatgccttgtatcagcttgtatctagttcggggcgggaatccgacgcgcttcggcagcagacgtcgcttcctcccttgatcacgcctatccctctggacgatagccaatacgtcaattacgctgaaaaatacagctatgatcaggcgggcaatttaatcaagcttagccataacggggcaagtcaatatacaacgaatgtgtatgtggacaaaagctcaaaccgggggatttggcggcaaggggaagacatcccggatatcgcggcttcctttgacagagcaggcaatcaacaagctttattcccggggagaccgttggaatgggatacacgcaatcaattaagccgtgtccatatggtcgtgcgcgaaggcggagacaacgactgggaaggctatctctatgacagctcgggaatgcgtatcgtaaaacgatctacccgcaaaacacagacaacgacgcaaacggatacgaccctctatttgccgggcctggagctgcgaatccgccagaccggggaccgggtcacggaagcattgcaggtcattaccgtggatgagggagcgggacaagtgagggtgctgcactgggaggatggaaccgagccgggcggcatcgccaatgatcagtaccggtacagcctgaacgatcatcttacctcctctttattggaagttgacgggcaaggtcagatcattagtaaggaagaattttatccctatggcggcacagccctgtggacagcccggtcagaggtagaggcaagctacaagaccatccgctattcaggcaaagagcgggatgccacaggcctgtattattacggacaccgctactatatgccatggttgggtcgctggctgaatccggacccggccggaatggtagatggactaaacctgtaccgtatggtcaggaacaatcctataggactgatggatccgaatgggaatgcgccaatcaacgtggcggattatagcttcgtgcatggtgatttagtttatggtcttagtaaggaaagaggaagatatctaaagctatttaatccaaactttaatatggaaaaatcagactctcctgctatggttatagatcaatataataataatgttgcattgagtataactaaccaatataaagtagaagaattgatgaaatttcaaaaagacccacaaaaagccgcacggaaaataaaggttccagaagggaatcgtttatcgaggaacgaaaattatcctttgtggcacgattatattaacattggagaagctaaagctgcatttaaggcctctcatattttccaagaagtgaaggggaattatgggaaagattattatcataaattattattagacagaatgatagaatcgccgttgctgtggaaacgaggcagcaaactcgggctagaaatcgccgctaccaatcagagaacaaaaatacactttgttcttgacaatttaaatatcgagcaggtggttacgaaagagggtagcggcggtcagtcaatcacagcttcggagctccgttatatttatcgaaatcgcgaaagattgaacgggcgtgtcattttctatagaaataatgaaaggctagatcaggctccatggcaagaaaatccggacttatggagcaaatatcaaccgggtcttagacaaagcagcagttcaagagtcaaagaacgagggattgggaactttttccgccggttttcaatgaagagaaagtaa

SEQ ID NO: 42 - DNA, 2793 bp, Paenibacillus strain DAS1529
atgaacacaacgtccatatataggggcacgcctacgatttcagttgtggataaccggaacttggagattcgcattcttcagtataaccgtatcgcggctgaagatccggcagatgagtgtatcctgcggaacacgtatacgccgttaagctatcttggcagcagcatggatccccgtttgttctcgcaatatcaggatgatcgcggaacaccgccgaatatacgaaccatggcttccctgagaggcgaagcgctgtgttcggaaagtgtggatgccggccgcaaggcggagctttttgatatcgaggggcggcccgtctggcttatcgatgccaacggcacagagacgactctcgaatatgatgtcttaggcaggccaacagccgtattcgagcaacaggaaggtacggactccccccagtgcagggagcggtttatttatggtgagaaggaggcggatgcccaggccaacaatttgcgcggacaactggttcgccactacgataccgcgggccggatacagaccgacagcatctccttggctggactgccgttgcgccaaagccgtcaactgctgaaaaattgggatgaacctggcgactggagtatggatgaggaaagcgcctgggcctcgttgctggctgccgaagcttatgatacgagctggcggtatgacgcgcaggacagggtgctcgcccaaaccgacgccaaagggaatctccagcaactgacttacaatgacgccggccagccgcaggcggtcagcctcaagctgcaaggccaagcggagcaacggatttggaaccggatcgagtacaacgcggcgggtcaagtggatctcgccgaagccgggaatggaatcgtaacggaatatacttacgaggaaagcacgcagcggttaatccgaaaaaaagattcccgcggactgtcctccggggaaagagaagtgctgcaggattatcgttatgaatatgatccggtaggcaatatcctttctatttacaatgaagcggagccggttcgttatttccgcaatcaggccgttgctccgaaaaggcaatatgcctacgatgccttgtatcagcttgtatctagttcggggcgggaatccgacgcgcttcggcagcagacgtcgcttcctcccttgatcacgcctatccctctggacgatagccaatacgtcaattacgctgaaaaatacagctatgatcaggcgggcaatttaatcaagcttagccataacggggcaagtcaatatacaacgaatgtgtatgtggacaaaagctcaaaccgggggatttggcggcaaggggaagacatcccggatatcgcggcttcctttgacagagcaggcaatcaacaagctttattcccggggagaccgttggaatgggatacacgcaatcaattaagccgtgtccatatggtcgtgcgcgaaggcggagacaacgactgggaaggctatctctatgacagctcgggaatgcgtatcgtaaaacgatctacccgcaaaacacagacaacgacgcaaacggatacgaccctctatttgccgggcctggagctgcgaatccgccagaccggggaccgggtcacggaagcattgcaggtcattaccgtggatgagggagcgggacaagtgagggtgctgcactgggaggatggaaccgagccgggcggcatcgccaatgatcagtaccggtacagcctgaacgatcatcttacctcctctttattggaagttgacgggcaaggtcagatcattagtaaggaagaattttatccctatggcggcacagccctgtggacagcccggtcagaggtagaggcaagctacaagaccatccgctattcaggcaaagagcgggatgccacaggcctgtattattacggacaccgctactatatgccatggttgggtcgctggctgaatccggacccggccggaatggtagatggactaaacctgtaccgtatggtcaggaacaatcctataggactgatggatccgaatgggaatgcgccaatcaacgtggcggattatagcttcgtgcatggtgatttagtttatggtcttagtaaggaaagaggaagatatctaaagctatttaatccaaactttaatatggaaaaatcagactctcctgctatggttatagatcaatataataataatgttgcattgagtataactaaccaatataaagtagaagaattgatgaaatttcaaaaagacccacaaaaagccgcacggaaaataaaggttccagaagggaatcgtttatcgaggaacgaaaattatcctttgtggcacgattatattaacattggagaagctaaagctgcatttaaggcctctcatattttccaagaagtgaaggggaattatgggaaagattattatcataaattattattagacagaatgatagaatcgccgttgctgtggaaacgaggcagcaaactcgggctagaaatcgccgctaccaatcagagaacaaaaatacactttgttcttgacaatttaaatatcgagcaggtggttacgaaagagggtagcggcggtcagtcaatcacagcttcggagctccgttatatttatcgaaatcgcgaaagattgaacgggcgtgtcattttctatagaaataatgaaaggctagatcaggctccatggcaagaaaatccggacttatggagcaaatatcaaccgggtcttagacaaagcagcagttcaagagtcaaagaacgagggattgggaactttttccgccggttttcaatgaagagaaagtag

SEQ ID NO: 43 - DNA, 4428 bp, Artificial Sequence
  Nucleic acid sequence optimized for expression in plants that encodes the Class B TC protein TcdB2
atggctcaaaattcccaggacttctccataactgaactcagcttgcccaagggtggaggtgccatcactgggatgggtgaggccctcacaccaactggccctgatgggatggctgcactctccttgcccttgccaatctccgctggaagaggctatgcacctgccttcacactcaactacaactctggtgctgggaactcaccctttggacttggctgggactgcaatgtgatgaccataaggaggcgcacccactttggtgttccacactatgatgagactgacaccttccttggaccagaaggtgaggtgcttgttgtcgctgaccagccacgtgatgagagcaccttgcaagggatcaaccttggtgccaccttcacagtgactggctaccgcagcagacttgagtcacacttcagcagacttgagtattggcaacccaagaccactgggaagactgacttctggctcatctactcccctgatggccaagttcatctccttgggaagtcaccacaggcacgcatctccaacccctcacaaaccacacagactgcacagtggctccttgaagcctcagtcagctcccgtggtgaacagatctactaccagtacagagctgaagatgacactggctgtgaggctgatgagataacccatcacctccaagccacagcacaacgctacctccacattgtctactatgggaacaggactgcctcagagacactccctggacttgatggctctgcaccctcccaagctgactggttgttctaccttgtctttgactatggtgaacgctccaacaatttgaagaccccacctgccttcagcaccactggctcctggctctgccgtcaggaccgcttcagcagatatgagtatggctttgagataaggacaaggcgcctttgcagacaagtcttgatgtaccatcacctccaagcacttgactccaagatcactgaacacaatggacccacccttgtgagccgtctcatcttgaactatgatgagtcagccattgcctccacacttgtctttgtcaggcgtgttggccatgagcaagatgggaatgttgtcacccttccacccttggaacttgcctaccaggacttcagccccaggcaccatgcacactggcagccaatggatgtccttgccaacttcaatgccattcaacgctggcagcttgttgacttgaagggtgaaggcctcccaggactcttgtaccaagacaagggtgcctggtggtaccgcagcgcacagaggcttggtgagattggctctgatgctgtgacctgggagaagatgcagcccttgtcagtgattcccagcctccagagcaatgcctcccttgttgacatcaatggtgatgggcagcttgactgggtgataacaggccctggcttgagaggctaccacagccagaggcctgatggctcctggacacgcttcacccccttgaacgcactcccagttgagtacacccatccacgtgcccaacttgctgacttgatgggtgctggcctctctgaccttgtcttgattggacccaagtctgttagactctatgccaacacacgtgatggctttgccaaagggaaggatgttgtccagtctggtgacataaccttgcctgtgcctggtgctgatccacgcaaacttgttgccttctcagatgttcttggctctgggcaagcacatcttgttgaagtctcagccactaaggttacttgttggccaaatttgggaagaggcagattcggacagcctattacactccctggcttcagccaacctgccactgagttcaaccctgcccaagtctacttggctgaccttgatggctctggacccactgatctcatctatgttcacaccaacaggcttgacatcttcttgaacaagtctgggaatggcttcgctgaacctgtgacattgcgctttcctgaaggcctccgctttgaccacacctgccagctccaaatggctgatgtgcaaggccttggtgttgcctccttgattctctctgttccacacatgtcaccacatcactggcgttgtgatctcaccaacatgaagccctggctcttgaatgagatgaacaacaacatgggtgttcatcacacattgcgctacagaagctcaagccagttctggcttgatgagaaggctgccgcactcaccactggccagaccccagtctgctacctccccttccccattcacaccttgtggcagactgagactgaagatgagatttctgggaacaaacttgtgaccacattgcgctatgcacgtggtgcctgggatggacgtgagcgtgagttccgtggctttggctacgttgagcagactgacagccatcagcttgcacaagggaacgcaccagagcgcaccccacctgcactcaccaagaactggtacgccacaggcctcccagtgattgacaatgcactcagcactgagtactggcgcgatgaccaagcctttgctggcttctcaccccgcttcaccacatggcaagacaacaaggatgttcccttgacccctgaagatgacaactcccgctactggttcaaccgtgccctcaagggccaactcttgaggtctgaactctatggacttgatgacagcaccaacaaacatgtcccctacacagtgactgagttccgctcccaagtgaggcgcctccagcacactgacagccgttaccctgtcttgtggtccagcgtcgttgagtctagaaactaccactacgagaggattgcctctgatccacaatgcagccagaacattacactctccagcgaccgctttggacagccactcaaacaactctcagtgcagtacccaaggcgccagcaacctgccatcaacttgtaccctgacaccctccctgacaaactccttgccaactcatatgatgaccagcaaaggcaactcaggttgacctaccaacagtccagctggcatcacttgaccaacaacactgttcgtgtgcttggactccctgacagcacacgctctgacatcttcacctatggtgctgagaatgtgcctgctggtggcctcaaccttgaactcttgtctgacaaaaattccttgattgctgatgacaaaccacgtgagtaccttggacagcagaagacagcctacaccgatggccagaacaccacaccactccaaacccccaccaggcaagccttgattgccttcactgagaccacagtcttcaaccagtcaacactctctgccttcaatgggagcataccctctgacaagttgtcaaccacacttgaacaggctggctaccagcaaacaaactacctctttcccaggactggtgaagacaaggtctgggttgcacatcacggctacactgactatgggacagctgcacaattctggaggcctcagaaacaatccaacacccaactcactgggaagatcaccttgatttgggatgctaactactgtgtcgttgtccagactcgtgatgctgctggactcaccacatctgccaagtatgactggcgctttctcacccctgtgcaactcactgacatcaacgacaaccagcacttgataacccttgatgcacttggccgtccaatcacattgcgcttctgggggactgagaatgggaagatgacaggctacagctcccctgagaaggccagcttctccccaccctctgatgtcaatgctgccattgaactcaaaaaaccactccctgttgcacagtgccaagtctatgccccagagagctggatgcctgtcttgagccaaaagaccttcaaccgtcttgctgaacaggactggcagaaactctacaatgcacgcataatcactgaagatggacgcatctgcacacttgcctacagaaggtgggtgcaatcacagaaggccattccacaactcataagcctcttgaacaatggacccaggctcccaccacacagcttgacactcaccactgacagatatgaccatgatccagagcagcaaatcaggcaacaggttgtcttctcagatggctttggacgtttgctccaagctgccgctcgccatgaagctgggatggcacgtcagaggaacgaagatggctccttgatcatcaatgttcagcacactgagaacaggtgggctgtgactggacgcactgagtatgacaacaaggggcagccaatcaggacctaccagccctactttctcaatgactggagatatgtctccaatgactcagcacgtcaggagaaggaagcctatgctgacacccatgtctatgatccaattggacgtgagatcaaggtgataactgccaagggctggttcagacgcacactcttcaccccctggttcactgtgaacgaagatgagaatgacacagctgctgaagtgaagaaggtcaagatgtga

SEQ ID NO: 44 - DNA, 2886 bp, Artificial Sequence
  Nucleic acid sequence optimized for expression in plants that encodes the Class C TC protein TccC3
atggccaagaacattgacccaaaattgtaccaaaagactcccactgtgtctgtttacgacaatcgtggcttgatcataagaaacattgacttccataggacaactgccaatggagaccctgacaccagaatcaccaggcatcagtatgacattcatgggcacctcaaccagagcattgacccaagactctacgaagccaagcagacaaacaacaccatcaagcccaacttcctttggcagtatgacttgactggcaaccctctctgcactgaatccatagatgctggccgcactgtcacattgaatgacattgagggccgccctcttctcactgtcactgccactggtgtcatccaaaccaggcagtatgagaccagctcactccctggccgccttctctctgtggcagaacaaactcccgaggaaaagacaagccgcataactgagagactcatctgggctggcaacactgaagcagagaaagaccacaacttggctgggcagtgtgtgaggcactatgacactgctggagtcacaaggttggagtcgttgtccctcactggcactgtcctttcccagtccagccaactcctcattgacacccaagaagccaactggactggtgacaatgagactgtttggcagaacatgttggctgatgacatctacaccacactctcaaccttcgatgccactggagcactcctcacacagactgatgccaaaggcaacatccaaagattggcctatgatgtggctggccaactcaatgggtcatggctcaccctcaagggacagactgagcaagtgatcatcaagtccctcacatactctgctgctgggcagaagttgagagaggaacatggcaatgatgtcataactgagtacagctatgagcctgagacccagagactcattggcatcaagaccaggaggccctctgacaccaaagttcttcaagatcttcgctatgagtatgaccctgtgggcaatgtgatctcaatcaggaatgatgcagaagccacaaggttctggcacaatcagaaggtcatgcctgagaacacctacacctatgacagcctctaccaactcatctctgccactggccgtgagatggccaacattgggcaacaatcacaccagtttcccagcccagcactcccatctgacaacaacacatacaccaactacaccagaacatacacctatgatcgtggtggcaacctcacaaaaatccaacacagcagcccagccacacagaacaactacaccaccaacatcactgtgagcaacaggagcaacagagcagtcttgtcgacactcactgaggacccagcacaggtggatgcactctttgatgctggtgggcaccagaacaccctcatctctggccagaatctcaactggaacacccgtggtgagttgcaacaggtgacattggtcaagagggacaagggagccaatgatgacagagaatggtaccgctactctggtgatggccgccgcatgttgaagatcaatgagcaacaggcctccaacaatgcacagacccagagggtcacatacttgcccaaccttgagttgaggctcacccagaacagcactgccaccactgaggaccttcaagtcatcactgtgggagaagccggccgtgctcaggtcagggttcttcactgggagtctggcaaacccgaggacatagacaacaaccagctcaggtacagctacgacaatctcattggctcatcccagttggagttggactctgaaggccaaatcatatctgaggaagagtactacccttatggaggcactgcactttgggctgccaggaaccagactgaggcaagctacaagacaatcaggtactctggcaaggagagggatgccactggactctactactatggttaccgctactaccaaccttggattggccgctggctttcctctgatcccgctggcaccattgatggtctcaacctctaccgcatggtcaggaacaaccctgtcacattgcttgaccctgatggactcatgcccaccattgcagagaggattgctgccttgaagaagaacaaggtcactgactctgctcccagcccagccaatgccaccaatgtggccatcaacataagaccacctgtggctcccaagccctcacttcccaaggcttccaccagctcacaacccacaactcaccctattggtgctgccaacatcaagcccaccacctctgggtccagcattgtggctcctctcagccctgtgggcaacaagtcaacctctgagatcagccttcccgagtctgctcagtcctcctcatcaagcaccaccagcaccaacctccagaagaagtccttcaccctctaccgtgctgacaacagatcctttgaagagatgcagtccaagttcccagagggcttcaaggcttggactcctcttgacacaaaaatggccagacaattcgcttccatcttcatcgggcagaaggacaccagcaaccttcccaaggagactgtcaagaacatctccacctggggtgccaagcccaagctcaaggacctttccaactacatcaagtacaccaaggacaagtccactgtttgggtttccactgccatcaatactgaagctggtgggcagtcctctggtgctccactccacaaaattgacatggacctctatgagttcgccattgatgggcagaagctcaacccactcccagagggccgcacaaagaacatggttccctccctcctccttgacactccacagattgagacctcctccatcattgctctcaatcacgggccagtgaacgatgctgagatctcattcctcaccaccataccactcaaaaatgtcaagccacataagaggtga

SEQ ID NO: 45 - DNA, 7313 bp, Artificial Sequence
  Nucleic acid sequence encoding TcdB2/TccC3 fusion protein pDAB8563
tctagactgagtcgacgcactactagtaacaaagaaggagatataccatgcaaaattcacaagattttagtattacggaactgtcactgcccaaaggggggggcgctatcacgggaatgggtgaagcattaacccccactggaccggatggtatggccgcgctatctctaccattgcctatttctgccgggcgcggttatgctcccgcattcactctgaattacaacagcggcgccggtaacagtccatttggtctgggttgggattgcaacgttatgactatccgccgccgcacccattttggcgtcccccattatgacgaaaccgatacctttttggggccagaaggcgaagtgctggtggtagcggatcaacctcgcgacgaatccacattacagggtatcaatttaggcgccacctttaccgttaccggctaccgttcccgtctggaaagccatttcagccgattggaatattggcaacccaaaacaacaggtaaaacagatttttggttgatatatagcccagatgggcaggtgcatctactgggtaaatcaccgcaagcgcggatcagcaacccatcccaaacgacacaaacagcacaatggctgctggaagcctctgtatcatcacgtggcgaacaaatttattatcaatatcgcgccgaagatgacacaggttgcgaagcagatgaaattacgcaccatttacaggctacagcgcaacgttatttacacatcgtgtattacggcaaccgtacagccagcgaaacattacccggtctggatggcagcgccccatcacaagcagactggttgttctatctggtatttgattacggcgaacgcagtaacaacctgaaaacgccaccagcattttcgactacaggtagctggctttgccgtcaggaccgtttttcccgttatgaatatggctttgagattcgtacccgccgcttatgccgtcaggtattgatgtaccatcacctgcaagcactggatagtaagataacagaacacaacggaccaacgctggtttcacgcctgatactcaattacgacgaaagcgcgatagccagcacgctagtattcgttcgccgagtgggacacgagcaagatggtaatgtcgtcaccctgccgccattagaattggcatatcaggatttttcaccgcgacatcacgctcactggcaaccaatggatgtactggcaaacttcaatgccattcagcgctggcagctagtcgatctaaaaggcgaaggattacccggcctgttatatcaggataaaggcgcttggtggtaccgctccgcacagcgtctgggcgaaattggctcagatgccgtcacttgggaaaagatgcaacctttatcggttattccttctttgcaaagtaatgcctcgttggtggatatcaatggagacggccaacttgactgggttatcaccggaccgggattacggggatatcatagtcaacgcccggatggcagttggacacgttttaccccactcaacgctctgccggtggaatacacccatccacgcgcgcaactcgcagatttaatgggagccgggctatccgatttggtgctgatcggccctaagagcgtgcgtttatatgccaatacccgcgacggctttgccaaaggaaaagatgtggtgcaatccggtgatatcacactgccggtgccgggcgccgatccacgtaagttggtggcgtttagtgatgtattgggttcaggtcaagcccatctggttgaagtaagcgcgactaaagtcacctgctggcctaatctggggcgcggacgttttggtcaacccattaccttaccgggattcagccagccagcaaccgagtttaacccggctcaagtttatctggccgatctggatggcagcggtccaacggatctgatttatgttcatacaaaccgtctggatatcttcctgaacaaaagtggcaatggctttgctgaaccagtgacattacgcttcccggaaggtctgcgttttgatcatacctgtcagttacaaatggccgatgtacaaggattaggcgtcgccagcctgatactgagcgtgccgcatatgtctccccatcactggcgctgcgatctgaccaacatgaagccgtggttactcaatgaaatgaacaacaatatgggggtccatcacaccttgcgttaccgcagttcctcccaattctggctggatgaaaaagccgcggcgctgactaccggacaaacaccggtttgctatctccccttcccgatccacaccctatggcaaacggaaacagaagatgaaatcagcggcaacaaattagtcacaacacttcgttatgctcgtggcgcatgggacggacgcgagcgggaatttcgcggatttggttatgtagagcagacagacagccatcaactggctcaaggcaacgcgccagaacgtacgccaccggcgctgaccaaaaactggtatgccaccggactgccggtgatagataacgcattatcaaccgagtattggcgtgatgatcaggcttttgccggtttctcaccgcgctttacgacttggcaagataacaaagatgtcccgttaacaccggaagatgataacagtcgttactggttcaaccgcgcgttgaaaggtcaactgctacgtagtgaactgtacggattggacgatagtacaaataaacacgttccctatactgtcactgaatttcgttcacaggtacgtcgattacagcataccgacagccgataccctgtactttggtcatctgtagttgaaagccgcaactatcactacgaacgtatcgccagcgacccgcaatgcagtcaaaatattacgctatccagtgatcgatttggtcagccgctaaaacagctttcggtacagtacccgcgccgccagcagccagcaatcaatctgtatcctgatacattgcctgataagttgttagccaacagctatgatgaccaacaacgccaattacggctcacctatcaacaatccagttggcatcacctgaccaacaataccgttcgagtattgggattaccggatagtacccgcagtgatatctttacttatggcgctgaaaatgtgcctgctggtggtttaaatctggaacttctgagtgataaaaatagcctgatcgcggacgataaaccacgtgaatacctcggtcagcaaaaaaccgcttataccgatggacaaaatacaacgccgttgcaaacaccaacacggcaagccctgattgcctttaccgaaacaacggtattcaaccagtccacattatcagcgtttaacggaagcatcccgtccgataaattatcaacgacgctggagcaagctggatatcagcaaacaaattatctattccctcgcactggagaagataaagtttgggtagcccatcacggctataccgattatggtacagcggcacagttctggcgcccgcaaaaacagagcaacacccaactcaccggtaaaatcaccctcatctgggatgcaaactattgcgttgtggtacaaacccgggatgctgctggactgacaacctcagccaaatatgactggcgttttctgaccccggtgcaactcaccgatatcaatgacaatcagcaccttatcacactggatgcattgggccgaccaatcacattgcgcttttggggaactgaaaacggcaagatgacaggttattcctcaccggaaaaagcatcattttctccaccatccgatgttaatgccgctattgagttaaaaaaaccgctccctgtagcacagtgtcaggtctacgcaccagaaagctggatgccagtattaagtcagaaaaccttcaatcgactggcagaacaagattggcaaaagttatataacgcccgaatcatcaccgaagatggacgtatctgcacactggcttatcgccgctgggtacaaagccaaaaggcaatccctcaactcattagcctgttaaacaacggaccccgtttacctcctcacagcctgacattgacgacggatcgttatgatcacgatcctgagcaacagatccgtcaacaggtggtattcagtgatggctttggccgcttgctgcaagccgctgcccgacatgaggcaggcatggcccggcaacgcaatgaagacggctctttgattataaatgtccagcatactgagaaccgttgggcagtgactggacgaacggaatatgacaataaggggcaaccgatacgtacctatcagccctatttcctcaatgactggcgatacgtcagcaatgatagtgcccggcaggaaaaagaagcttatgcagatacccatgtctatgatcccataggtcgagaaatcaaggttatcaccgcaaaaggttggttccgtcgaaccttgttcactccctggtttactgtcaatgaagatgaaaatgacacagccgctgaggtgaagaaggtaaagatgccgggatccggtctcataatccgtaacatcgattttcatcgtactaccgcaaatggtgatcccgatacccgtattacccgccatcaatacgatattcacggacacctaaatcaaagcatcgatccgcgcctatatgaagccaagcaaaccaacaatacgatcaaacccaattttctttggcagtatgatttgaccggtaatcccctatgtacagagagcattgatgcaggtcgcactgtcaccttgaatgatattgaaggccgtccgctactaacggtgactgcaacaggggttatacaaactcgacaatatgaaacttcttccctgcccggtcgtctgttatctgttgccgaacaaacacccgaggaaaaaacatcccgtatcaccgaacgcctgatttgggctggcaataccgaagcagagaaagaccataaccttgccggccagtgcgtgcgtcactatgacacggcgggagttacccggttagagagtttatcactgaccggtactgttttatctcaatccagccaactattgatcgacactcaagaggcaaactggacaggtgataacgaaaccgtctggcaaaacatgctggctgatgacatctacacaaccctgagcaccttcgatgccaccggtgctttactgactcagaccgatgcgaaagggaacattcagagactggcttatgatgtggccgggcagctaaacgggagctggctaacactcaaaggccagacggaacaagtgattatcaaatccctgacctactccgccgccggacaaaaattacgtgaggaacacggcaatgatgttatcaccgaatacagttatgaaccggaaacccaacggctgatcggtatcaaaacccgccgtccgtcagacactaaagtgctacaagacctgcgctatgaatatgacccggtaggcaatgtcatcagcatccgtaatgacgcggaagccacccgcttttggcacaatcagaaagtgatgccggaaaacacttatacctacgattccctgtatcagcttatcagcgccaccgggcgcgaaatggcgaatataggtcaacaaagtcaccaatttccctcacccgctctaccttctgataacaacacctataccaactatacccgtacttatacttatgaccgtggcggcaatctgaccaaaatccagcacagttcaccggcgacgcaaaacaactacaccaccaatatcacggtttcaaatcgcagcaaccgcgcagtactcagcacattgaccgaagatccggcgcaagtagatgctttgtttgatgcaggcggacatcagaacaccttgatatcaggacaaaacctgaactggaatactcgtggtgaactgcaacaagtaacactggttaaacgggacaagggcgccaatgatgatcgggaatggtatcgttatagcggtgacggaagaaggatgttaaaaatcaatgaacagcaggccagcaacaacgctcaaacacaacgtgtgacttatttgccgaacttagaacttcgtctaacacaaaacagcacggccacaaccgaagatttgcaagttatcaccgtaggcgaagcgggccgggcacaggtacgagtattacattgggagagcggtaaaccggaagatatcgacaataatcagttgcgttatagttacgataatcttatcggttccagtcaacttgaattagatagcgaaggacaaattatcagtgaagaagaatattatccctatggtggaacagcattatgggccgccaggaatcagacagaagccagttataaaactatccgttattcaggcaaagagcgggatgccaccgggctatattactacggctatcggtattaccaaccgtggataggacggtggttaagctccgatccggcaggaacaatcgatgggctgaatttatatcggatggtgaggaataatccagttaccctccttgatcctgatggattaatgccaacaattgcagaacgcatagcagcactaaaaaaaaataaagtaacagactcagcgccttcgccagcaaatgccacaaacgtagcgataaacatccgcccgcctgtagcaccaaaacctagcttaccgaaagcatcaacgagtagccaaccaaccacacaccctatcggagctgcaaacataaaaccaacgacgtctgggtcatctattgttgctccattgagtccagtaggaaataaatctacttctgaaatctctctgccagaaagcgctcaaagcagttcttcaagcactacctcgacaaatctacagaaaaaatcatttactttatatagagcagataacagatcctttgaagaaatgcaaagtaaattccctgaaggatttaaagcctggactcctctagacactaagatggcaaggcaatttgctagtatctttattggtcagaaagatacatctaatttacctaaagaaacagtcaagaacataagcacatggggagcaaagccaaaactaaaagatctctcaaattacataaaatataccaaggacaaatctacagtatgggtttctactgcaattaatactgaagcaggtggacaaagctcaggggctccactccataaaattgatatggatctctacgagtttgccattgatggacaaaaactaaatccactaccggagggtagaactaaaaacatggtaccttcccttttactcgacaccccacaaatagagacatcatccatcattgcacttaatcatggaccggtaaatgatgcagaaatttcatttctgacaacaattccgcttaaaaatgtaaaacctcataagagataattaatctgactcgag

SEQ ID NO: 46 - protein, 2416 aa, Artificial Sequence
  TcdB2/TccC3 fusion protein pDAB8563
MQNSQDFSITELSLPKGGGAITGMGEALTPTGPDGMAALSLPLPISAGRGYAPAFTLNYNSGAGNSPFGLGWDCNVMTIRRRTHFGVPHYDETDTFLGPEGEVLVVADQPRDESTLQGINLGATFTVTGYRSRLESHFSRLEYWQPKTTGKTDFWLIYSPDGQVHLLGKSPQARISNPSQTTQTAQWLLEASVSSRGEQIYYQYRAEDDTGCEADEITHHLQATAQRYLHIVYYGNRTASETLPGLDGSAPSQADWLFYLVFDYGERSNNLKTPPAFSTTGSWLCRQDRFSRYEYGFEIRTRRLCRQVLMYHHLQALDSKITEHNGPTLVSRLILNYDESAIASTLVFVRRVGHEQDGNVVTLPPLELAYQDFSPRHHAHWQPMDVLANFNAIQRWQLVDLKGEGLPGLLYQDKGAWWYRSAQRLGEIGSDAVTWEKMQPLSVIPSLQSNASLVDINGDGQLDWVITGPGLRGYHSQRPDGSWTRFTPLNALPVEYTHPRAQLADLMGAGLSDLVLIGPKSVRLYANTRDGFAKGKDVVQSGDITLPVPGADPRKLVAFSDVLGSGQAHLVEVSATKVTCWPNLGRGRFGQPITLPGFSQPATEFNPAQVYLADLDGSGPTDLIYVHTNRLDIFLNKSGNGFAEPVTLRFPEGLRFDHTCQLQMADVQGLGVASLILSVPHMSPHHWRCDLTNMKPWLLNEMNNNMGVHHTLRYRSSSQFWLDEKAAALTTGQTPVCYLPFPIHTLWQTETEDEISGNKLVTTLRYARGAWDGREREFRGFGYVEQTDSHQLAQGNAPERTPPALTKNWYATGLPVIDNALSTEYWRDDQAFAGFSPRFTTWQDNKDVPLTPEDDNSRYWFNRALKGQLLRSELYGLDDSTNKHVPYTVTEFRSQVRRLQHTDSRYPVLWSSVVESRNYHYERIASDPQCSQNITLSSDRFGQPLKQLSVQYPRRQQPAINLYPDTLPDKLLANSYDDQQRQLRLTYQQSSWHHLTNNTVRVLGLPDSTRSDIFTYGAENVPAGGLNLELLSDKNSLIADDKPREYLGQQKTAYTDGQNTTPLQTPTRQALIAFTETTVFNQSTLSAFNGSIPSDKLSTTLEQAGYQQTNYLFPRTGEDKVWVAHHGYTDYGTAAQFWRPQKQSNTQLTGKITLIWDANYCVVVQTRDAAGLTTSAKYDWRFLTPVQLTDINDNQHLITLDALGRPITLRFWGTENGKMTGYSSPEKASFSPPSDVNAAIELKKPLPVAQCQVYAPESWMPVLSQKTFNRLAEQDWQKLYNARIITEDGRICTLAYRRWVQSQKAIPQLISLLNNGPRLPPHSLTLTTDRYDHDPEQQIRQQVVFSDGFGRLLQAAARHEAGMARQRNEDGSLIINVQHTENRWAVTGRTEYDNKGQPIRTYQPYFLNDWRYVSNDSARQEKEAYADTHVYDPIGREIKVITAKGWFRRTLFTPWFTVNEDENDTAAEVKKVKMPGSGLIIRNIDFHRTTANGDPDTRITRHQYDIHGHLNQSIDPRLYEAKQTNNTIKPNFLWQYDLTGNPLCTESIDAGRTVTLNDIEGRPLLTVTATGVIQTRQYETSSLPGRLLSVAEQTPEEKTSRITERLIWAGNTEAEKDHNLAGQCVRHYDTAGVTRLESLSLTGTVLSQSSQLLIDTQEANWTGDNETVWQNMLADDIYTTLSTFDATGALLTQTDAKGNIQRLAYDVAGQLNGSWLTLKGQTEQVIIKSLTYSAAGQKLREEHGNDVITEYSYEPETQRLIGIKTRRPSDTKVLQDLRYEYDPVGNVISIRNDAEATRFWHNQKVMPENTYTYDSLYQLISATGREMANIGQQSHQFPSPALPSDNNTYTNYTRTYTYDRGGNLTKIQHSSPATQNNYTTNITVSNRSNRAVLSTLTEDPAQVDALFDAGGHQNTLISGQNLNWNTRGELQQVTLVKRDKGANDDREWYRYSGDGRRMLKINEQQASNNAQTQRVTYLPNLELRLTQNSTATTEDLQVITVGEAGRAQVRVLHWESGKPEDIDNNQLRYSYDNLIGSSQLELDSEGQIISEEEYYPYGGTALWAARNQTEASYKTIRYSGKERDATGLYYYGYRYYQPWIGRWLSSDPAGTIDGLNLYRMVRNNPVTLLDPDGLMPTIAERIAALKKNKVTDSAPSPANATNVAINIRPPVAPKPSLPKASTSSQPTTHPIGAANIKPTTSGSSIVAPLSPVGNKSTSEISLPESAQSSSSSTTSTNLQKKSFTLYRADNRSFEEMQSKFPEGFKAWTPLDTKMARQFASIFIGQKDTSNLPKETVKNISTWGAKPKLKDLSNYIKYTKDKSTVWVSTAINTEAGGQSSGAPLHKIDMDLYEFAIDGQKLNPLPEGRTKNMVPSLLLDTPQIETSSIIALNHGPVNDAEISFLTTIPLKNVKPHKR

SEQ ID NO: 47 - DNA, 7367 bp, Artificial Sequence
  Nucleic acid sequence encoding TcdB2/TccC3 fusion protein pDAB8564
tctagactgagtcgacgcactactagtaacaaagaaggagatataccatgcaaaattcacaagattttagtattacggaactgtcactgcccaaaggggggggcgctatcacgggaatgggtgaagcattaacccccactggaccggatggtatggccgcgctatctctaccattgcctatttctgccgggcgcggttatgctcccgcattcactctgaattacaacagcggcgccggtaacagtccatttggtctgggttgggattgcaacgttatgactatccgccgccgcacccattttggcgtcccccattatgacgaaaccgatacctttttggggccagaaggcgaagtgctggtggtagcggatcaacctcgcgacgaatccacattacagggtatcaatttaggcgccacctttaccgttaccggctaccgttcccgtctggaaagccatttcagccgattggaatattggcaacccaaaacaacaggtaaaacagatttttggttgatatatagcccagatgggcaggtgcatctactgggtaaatcaccgcaagcgcggatcagcaacccatcccaaacgacacaaacagcacaatggctgctggaagcctctgtatcatcacgtggcgaacaaatttattatcaatatcgcgccgaagatgacacaggttgcgaagcagatgaaattacgcaccatttacaggctacagcgcaacgttatttacacatcgtgtattacggcaaccgtacagccagcgaaacattacccggtctggatggcagcgccccatcacaagcagactggttgttctatctggtatttgattacggcgaacgcagtaacaacctgaaaacgccaccagcattttcgactacaggtagctggctttgccgtcaggaccgtttttcccgttatgaatatggctttgagattcgtacccgccgcttatgccgtcaggtattgatgtaccatcacctgcaagcactggatagtaagataacagaacacaacggaccaacgctggtttcacgcctgatactcaattacgacgaaagcgcgatagccagcacgctagtattcgttcgccgagtgggacacgagcaagatggtaatgtcgtcaccctgccgccattagaattggcatatcaggatttttcaccgcgacatcacgctcactggcaaccaatggatgtactggcaaacttcaatgccattcagcgctggcagctagtcgatctaaaaggcgaaggattacccggcctgttatatcaggataaaggcgcttggtggtaccgctccgcacagcgtctgggcgaaattggctcagatgccgtcacttgggaaaagatgcaacctttatcggttattccttctttgcaaagtaatgcctcgttggtggatatcaatggagacggccaacttgactgggttatcaccggaccgggattacggggatatcatagtcaacgcccggatggcagttggacacgttttaccccactcaacgctctgccggtggaatacacccatccacgcgcgcaactcgcagatttaatgggagccgggctatccgatttggtgctgatcggccctaagagcgtgcgtttatatgccaatacccgcgacggctttgccaaaggaaaagatgtggtgcaatccggtgatatcacactgccggtgccgggcgccgatccacgtaagttggtggcgtttagtgatgtattgggttcaggtcaagcccatctggttgaagtaagcgcgactaaagtcacctgctggcctaatctggggcgcggacgttttggtcaacccattaccttaccgggattcagccagccagcaaccgagtttaacccggctcaagtttatctggccgatctggatggcagcggtccaacggatctgatttatgttcatacaaaccgtctggatatcttcctgaacaaaagtggcaatggctttgctgaaccagtgacattacgcttcccggaaggtctgcgttttgatcatacctgtcagttacaaatggccgatgtacaaggattaggcgtcgccagcctgatactgagcgtgccgcatatgtctccccatcactggcgctgcgatctgaccaacatgaagccgtggttactcaatgaaatgaacaacaatatgggggtccatcacaccttgcgttaccgcagttcctcccaattctggctggatgaaaaagccgcggcgctgactaccggacaaacaccggtttgctatctccccttcccgatccacaccctatggcaaacggaaacagaagatgaaatcagcggcaacaaattagtcacaacacttcgttatgctcgtggcgcatgggacggacgcgagcgggaatttcgcggatttggttatgtagagcagacagacagccatcaactggctcaaggcaacgcgccagaacgtacgccaccggcgctgaccaaaaactggtatgccaccggactgccggtgatagataacgcattatcaaccgagtattggcgtgatgatcaggcttttgccggtttctcaccgcgctttacgacttggcaagataacaaagatgtcccgttaacaccggaagatgataacagtcgttactggttcaaccgcgcgttgaaaggtcaactgctacgtagtgaactgtacggattggacgatagtacaaataaacacgttccctatactgtcactgaatttcgttcacaggtacgtcgattacagcataccgacagccgataccctgtactttggtcatctgtagttgaaagccgcaactatcactacgaacgtatcgccagcgacccgcaatgcagtcaaaatattacgctatccagtgatcgatttggtcagccgctaaaacagctttcggtacagtacccgcgccgccagcagccagcaatcaatctgtatcctgatacattgcctgataagttgttagccaacagctatgatgaccaacaacgccaattacggctcacctatcaacaatccagttggcatcacctgaccaacaataccgttcgagtattgggattaccggatagtacccgcagtgatatctttacttatggcgctgaaaatgtgcctgctggtggtttaaatctggaacttctgagtgataaaaatagcctgatcgcggacgataaaccacgtgaatacctcggtcagcaaaaaaccgcttataccgatggacaaaatacaacgccgttgcaaacaccaacacggcaagccctgattgcctttaccgaaacaacggtattcaaccagtccacattatcagcgtttaacggaagcatcccgtccgataaattatcaacgacgctggagcaagctggatatcagcaaacaaattatctattccctcgcactggagaagataaagtttgggtagcccatcacggctataccgattatggtacagcggcacagttctggcgcccgcaaaaacagagcaacacccaactcaccggtaaaatcaccctcatctgggatgcaaactattgcgttgtggtacaaacccgggatgctgctggactgacaacctcagccaaatatgactggcgttttctgaccccggtgcaactcaccgatatcaatgacaatcagcaccttatcacactggatgcattgggccgaccaatcacattgcgcttttggggaactgaaaacggcaagatgacaggttattcctcaccggaaaaagcatcattttctccaccatccgatgttaatgccgctattgagttaaaaaaaccgctccctgtagcacagtgtcaggtctacgcaccagaaagctggatgccagtattaagtcagaaaaccttcaatcgactggcagaacaagattggcaaaagttatataacgcccgaatcatcaccgaagatggacgtatctgcacactggcttatcgccgctgggtacaaagccaaaaggcaatccctcaactcattagcctgttaaacaacggaccccgtttacctcctcacagcctgacattgacgacggatcgttatgatcacgatcctgagcaacagatccgtcaacaggtggtattcagtgatggctttggccgcttgctgcaagccgctgcccgacatgaggcaggcatggcccggcaacgcaatgaagacggctctttgattataaatgtccagcatactgagaaccgttgggcagtgactggacgaacggaatatgacaataaggggcaaccgatacgtacctatcagccctatttcctcaatgactggcgatacgtcagcaatgatagtgcccggcaggaaaaagaagcttatgcagatacccatgtctatgatcccataggtcgagaaatcaaggttatcaccgcaaaaggttggttccgtcgaaccttgttcactccctggtttactgtcaatgaagatgaaaatgacacagccgctgaggtgaagaaggtaaagatgatgaaaaacatcgatcccaaactttatcaaaaaacccctactgtcagcgtttacgataaccgtggtctcataatccgtaacatcgattttcatcgtactaccgcaaatggtgatcccgatacccgtattacccgccatcaatacgatattcacggacacctaaatcaaagcatcgatccgcgcctatatgaagccaagcaaaccaacaatacgatcaaacccaattttctttggcagtatgatttgaccggtaatcccctatgtacagagagcattgatgcaggtcgcactgtcaccttgaatgatattgaaggccgtccgctactaacggtgactgcaacaggggttatacaaactcgacaatatgaaacttcttccctgcccggtcgtctgttatctgttgccgaacaaacacccgaggaaaaaacatcccgtatcaccgaacgcctgatttgggctggcaataccgaagcagagaaagaccataaccttgccggccagtgcgtgcgtcactatgacacggcgggagttacccggttagagagtttatcactgaccggtactgttttatctcaatccagccaactattgatcgacactcaagaggcaaactggacaggtgataacgaaaccgtctggcaaaacatgctggctgatgacatctacacaaccctgagcaccttcgatgccaccggtgctttactgactcagaccgatgcgaaagggaacattcagagactggcttatgatgtggccgggcagctaaacgggagctggctaacactcaaaggccagacggaacaagtgattatcaaatccctgacctactccgccgccggacaaaaattacgtgaggaacacggcaatgatgttatcaccgaatacagttatgaaccggaaacccaacggctgatcggtatcaaaacccgccgtccgtcagacactaaagtgctacaagacctgcgctatgaatatgacccggtaggcaatgtcatcagcatccgtaatgacgcggaagccacccgcttttggcacaatcagaaagtgatgccggaaaacacttatacctacgattccctgtatcagcttatcagcgccaccgggcgcgaaatggcgaatataggtcaacaaagtcaccaatttccctcacccgctctaccttctgataacaacacctataccaactatacccgtacttatacttatgaccgtggcggcaatctgaccaaaatccagcacagttcaccggcgacgcaaaacaactacaccaccaatatcacggtttcaaatcgcagcaaccgcgcagtactcagcacattgaccgaagatccggcgcaagtagatgctttgtttgatgcaggcggacatcagaacaccttgatatcaggacaaaacctgaactggaatactcgtggtgaactgcaacaagtaacactggttaaacgggacaagggcgccaatgatgatcgggaatggtatcgttatagcggtgacggaagaaggatgttaaaaatcaatgaacagcaggccagcaacaacgctcaaacacaacgtgtgacttatttgccgaacttagaacttcgtctaacacaaaacagcacggccacaaccgaagatttgcaagttatcaccgtaggcgaagcgggccgggcacaggtacgagtattacattgggagagcggtaaaccggaagatatcgacaataatcagttgcgttatagttacgataatcttatcggttccagtcaacttgaattagatagcgaaggacaaattatcagtgaagaagaatattatccctatggtggaacagcattatgggccgccaggaatcagacagaagccagttataaaactatccgttattcaggcaaagagcgggatgccaccgggctatattactacggctatcggtattaccaaccgtggataggacggtggttaagctccgatccggcaggaacaatcgatgggctgaatttatatcggatggtgaggaataatccagttaccctccttgatcctgatggattaatgccaacaattgcagaacgcatagcagcactaaaaaaaaataaagtaacagactcagcgccttcgccagcaaatgccacaaacgtagcgataaacatccgcccgcctgtagcaccaaaacctagcttaccgaaagcatcaacgagtagccaaccaaccacacaccctatcggagctgcaaacataaaaccaacgacgtctgggtcatctattgttgctccattgagtccagtaggaaataaatctacttctgaaatctctctgccagaaagcgctcaaagcagttcttcaagcactacctcgacaaatctacagaaaaaatcatttactttatatagagcagataacagatcctttgaagaaatgcaaagtaaattccctgaaggatttaaagcctggactcctctagacactaagatggcaaggcaatttgctagtatctttattggtcagaaagatacatctaatttacctaaagaaacagtcaagaacataagcacatggggagcaaagccaaaactaaaagatctctcaaattacataaaatataccaaggacaaatctacagtatgggtttctactgcaattaatactgaagcaggtggacaaagctcaggggctccactccataaaattgatatggatctctacgagtttgccattgatggacaaaaactaaatccactaccggagggtagaactaaaaacatggtaccttcccttttactcgacaccccacaaatagagacatcatccatcattgcacttaatcatggaccggtaaatgatgcagaaatttcatttctgacaacaattccgcttaaaaatgtaaaacctcataagagataattaatctgactcgag

SEQ ID NO: 48 - protein, 2434 aa, Artificial Sequence
  TcdB2/TccC3 fusion protein pDAB8564
MQNSQDFSITELSLPKGGGAITGMGEALTPTGPDGMAALSLPLPISAGRGYAPAFTLNYNSGAGNSPFGLGWDCNVMTIRRRTHFGVPHYDETDTFLGPEGEVLVVADQPRDESTLQGINLGATFTVTGYRSRLESHFSRLEYWQPKTTGKTDFWLIYSPDGQVHLLGKSPQARISNPSQTTQTAQWLLEASVSSRGEQIYYQYRAEDDTGCEADEITHHLQATAQRYLHIVYYGNRTASETLPGLDGSAPSQADWLFYLVFDYGERSNNLKTPPAFSTTGSWLCRQDRFSRYEYGFEIRTRRLCRQVLMYHHLQALDSKITEHNGPTLVSRLILNYDESAIASTLVFVRRVGHEQDGNVVTLPPLELAYQDFSPRHHAHWQPMDVLANFNAIQRWQLVDLKGEGLPGLLYQDKGAWWYRSAQRLGEIGSDAVTWEKMQPLSVIPSLQSNASLVDINGDGQLDWVITGPGLRGYHSQRPDGSWTRFTPLNALPVEYTHPRAQLADLMGAGLSDLVLIGPKSVRLYANTRDGFAKGKDVVQSGDITLPVPGADPRKLVAFSDVLGSGQAHLVEVSATKVTCWPNLGRGRFGQPITLPGFSQPATEFNPAQVYLADLDGSGPTDLIYVHTNRLDIFLNKSGNGFAEPVTLRFPEGLRFDHTCQLQMADVQGLGVASLILSVPHMSPHHWRCDLTNMKPWLLNEMNNNMGVHHTLRYRSSSQFWLDEKAAALTTGQTPVCYLPFPIHTLWQTETEDEISGNKLVTTLRYARGAWDGREREFRGFGYVEQTDSHQLAQGNAPERTPPALTKNWYATGLPVIDNALSTEYWRDDQAFAGFSPRFTTWQDNKDVPLTPEDDNSRYWFNRALKGQLLRSELYGLDDSTNKHVPYTVTEFRSQVRRLQHTDSRYPVLWSSVVESRNYHYERIASDPQCSQNITLSSDRFGQPLKQLSVQYPRRQQPAINLYPDTLPDKLLANSYDDQQRQLRLTYQQSSWHHLTNNTVRVLGLPDSTRSDIFTYGAENVPAGGLNLELLSDKNSLIADDKPREYLGQQKTAYTDGQNTTPLQTPTRQALIAFTETTVFNQSTLSAFNGSIPSDKLSTTLEQAGYQQTNYLFPRTGEDKVWVAHHGYTDYGTAAQFWRPQKQSNTQLTGKITLIWDANYCVVVQTRDAAGLTTSAKYDWRFLTPVQLTDINDNQHLITLDALGRPITLRFWGTENGKMTGYSSPEKASFSPPSDVNAAIELKKPLPVAQCQVYAPESWMPVLSQKTFNRLAEQDWQKLYNARIITEDGRICTLAYRRWVQSQKAIPQLISLLNNGPRLPPHSLTLTTDRYDHDPEQQIRQQVVFSDGFGRLLQAAARHEAGMARQRNEDGSLIINVQHTENRWAVTGRTEYDNKGQPIRTYQPYFLNDWRYVSNDSARQEKEAYADTHVYDPIGREIKVITAKGWFRRTLFTPWFTVNEDENDTAAEVKKVKMMKNIDPKLYQKTPTVSVYDNRGLIIRNIDFHRTTANGDPDTRITRHQYDIHGHLNQSIDPRLYEAKQTNNTIKPNFLWQYDLTGNPLCTESIDAGRTVTLNDIEGRPLLTVTATGVIQTRQYETSSLPGRLLSVAEQTPEEKTSRITERLIWAGNTEAEKDHNLAGQCVRHYDTAGVTRLESLSLTGTVLSQSSQLLIDTQEANWTGDNETVWQNMLADDIYTTLSTFDATGALLTQTDAKGNIQRLAYDVAGQLNGSWLTLKGQTEQVIIKSLTYSAAGQKLREEHGNDVITEYSYEPETQRLIGIKTRRPSDTKVLQDLRYEYDPVGNVISIRNDAEATRFWHNQKVMPENTYTYDSLYQLISATGREMANIGQQSHQFPSPALPSDNNTYTNYTRTYTYDRGGNLTKIQHSSPATQNNYTTNITVSNRSNRAVLSTLTEDPAQVDALFDAGGHQNTLISGQNLNWNTRGELQQVTLVKRDKGANDDREWYRYSGDGRRMLKINEQQASNNAQTQRVTYLPNLELRLTQNSTATTEDLQVITVGEAGRAQVRVLHWESGKPEDIDNNQLRYSYDNLIGSSQLELDSEGQIISEEEYYPYGGTALWAARNQTEASYKTIRYSGKERDATGLYYYGYRYYQPWIGRWLSSDPAGTIDGLNLYRMVRNNPVTLLDPDGLMPTIAERIAALKKNKVTDSAPSPANATNVAINIRPPVAPKPSLPKASTSSQPTTHPIGAANIKPTTSGSSIVAPLSPVGNKSTSEISLPESAQSSSSSTTSTNLQKKSFTLYRADNRSFEEMQSKFPEGFKAWTPLDTKMARQFASIFIGQKDTSNLPKETVKNISTWGAKPKLKDLSNYIKYTKDKSTVWVSTAINTEAGGQSSGAPLHKIDMDLYEFAIDGQKLNPLPEGRTKNMVPSLLLDTPQIETSSIIALNHGPVNDAEISFLTTIPLKNVKPHKR

SEQ ID NO: 49 - DNA, 7382 bp, Artificial Sequence
  Nucleic acid sequence encoding TcdB2/TccC3 fusion protein pDAB8940
tctagactgagtcgacgcactactagtaacaaagaaggagatataccatgcaaaattcacaagattttagtattacggaactgtcactgcccaaaggggggggcgctatcacgggaatgggtgaagcattaacccccactggaccggatggtatggccgcgctatctctaccattgcctatttctgccgggcgcggttatgctcccgcattcactctgaattacaacagcggcgccggtaacagtccatttggtctgggttgggattgcaacgttatgactatccgccgccgcacccattttggcgtcccccattatgacgaaaccgatacctttttggggccagaaggcgaagtgctggtggtagcggatcaacctcgcgacgaatccacattacagggtatcaatttaggcgccacctttaccgttaccggctaccgttcccgtctggaaagccatttcagccgattggaatattggcaacccaaaacaacaggtaaaacagatttttggttgatatatagcccagatgggcaggtgcatctactgggtaaatcaccgcaagcgcggatcagcaacccatcccaaacgacacaaacagcacaatggctgctggaagcctctgtatcatcacgtggcgaacaaatttattatcaatatcgcgccgaagatgacacaggttgcgaagcagatgaaattacgcaccatttacaggctacagcgcaacgttatttacacatcgtgtattacggcaaccgtacagccagcgaaacattacccggtctggatggcagcgccccatcacaagcagactggttgttctatctggtatttgattacggcgaacgcagtaacaacctgaaaacgccaccagcattttcgactacaggtagctggctttgccgtcaggaccgtttttcccgttatgaatatggctttgagattcgtacccgccgcttatgccgtcaggtattgatgtaccatcacctgcaagcactggatagtaagataacagaacacaacggaccaacgctggtttcacgcctgatactcaattacgacgaaagcgcgatagccagcacgctagtattcgttcgccgagtgggacacgagcaagatggtaatgtcgtcaccctgccgccattagaattggcatatcaggatttttcaccgcgacatcacgctcactggcaaccaatggatgtactggcaaacttcaatgccattcagcgctggcagctagtcgatctaaaaggcgaaggattacccggcctgttatatcaggataaaggcgcttggtggtaccgctccgcacagcgtctgggcgaaattggctcagatgccgtcacttgggaaaagatgcaacctttatcggttattccttctttgcaaagtaatgcctcgttggtggatatcaatggagacggccaacttgactgggttatcaccggaccgggattacggggatatcatagtcaacgcccggatggcagttggacacgttttaccccactcaacgctctgccggtggaatacacccatccacgcgcgcaactcgcagatttaatgggagccgggctatccgatttggtgctgatcggccctaagagcgtgcgtttatatgccaatacccgcgacggctttgccaaaggaaaagatgtggtgcaatccggtgatatcacactgccggtgccgggcgccgatccacgtaagttggtggcgtttagtgatgtattgggttcaggtcaagcccatctggttgaagtaagcgcgactaaagtcacctgctggcctaatctggggcgcggacgttttggtcaacccattaccttaccgggattcagccagccagcaaccgagtttaacccggctcaagtttatctggccgatctggatggcagcggtccaacggatctgatttatgttcatacaaaccgtctggatatcttcctgaacaaaagtggcaatggctttgctgaaccagtgacattacgcttcccggaaggtctgcgttttgatcatacctgtcagttacaaatggccgatgtacaaggattaggcgtcgccagcctgatactgagcgtgccgcatatgtctccccatcactggcgctgcgatctgaccaacatgaagccgtggttactcaatgaaatgaacaacaatatgggggtccatcacaccttgcgttaccgcagttcctcccaattctggctggatgaaaaagccgcggcgctgactaccggacaaacaccggtttgctatctccccttcccgatccacaccctatggcaaacggaaacagaagatgaaatcagcggcaacaaattagtcacaacacttcgttatgctcgtggcgcatgggacggacgcgagcgggaatttcgcggatttggttatgtagagcagacagacagccatcaactggctcaaggcaacgcgccagaacgtacgccaccggcgctgaccaaaaactggtatgccaccggactgccggtgatagataacgcattatcaaccgagtattggcgtgatgatcaggcttttgccggtttctcaccgcgctttacgacttggcaagataacaaagatgtcccgttaacaccggaagatgataacagtcgttactggttcaaccgcgcgttgaaaggtcaactgctacgtagtgaactgtacggattggacgatagtacaaataaacacgttccctatactgtcactgaatttcgttcacaggtacgtcgattacagcataccgacagccgataccctgtactttggtcatctgtagttgaaagccgcaactatcactacgaacgtatcgccagcgacccgcaatgcagtcaaaatattacgctatccagtgatcgatttggtcagccgctaaaacagctttcggtacagtacccgcgccgccagcagccagcaatcaatctgtatcctgatacattgcctgataagttgttagccaacagctatgatgaccaacaacgccaattacggctcacctatcaacaatccagttggcatcacctgaccaacaataccgttcgagtattgggattaccggatagtacccgcagtgatatctttacttatggcgctgaaaatgtgcctgctggtggtttaaatctggaacttctgagtgataaaaatagcctgatcgcggacgataaaccacgtgaatacctcggtcagcaaaaaaccgcttataccgatggacaaaatacaacgccgttgcaaacaccaacacggcaagccctgattgcctttaccgaaacaacggtattcaaccagtccacattatcagcgtttaacggaagcatcccgtccgataaattatcaacgacgctggagcaagctggatatcagcaaacaaattatctattccctcgcactggagaagataaagtttgggtagcccatcacggctataccgattatggtacagcggcacagttctggcgcccgcaaaaacagagcaacacccaactcaccggtaaaatcaccctcatctgggatgcaaactattgcgttgtggtacaaacccgggatgctgctggactgacaacctcagccaaatatgactggcgttttctgaccccggtgcaactcaccgatatcaatgacaatcagcaccttatcacactggatgcattgggccgaccaatcacattgcgcttttggggaactgaaaacggcaagatgacaggttattcctcaccggaaaaagcatcattttctccaccatccgatgttaatgccgctattgagttaaaaaaaccgctccctgtagcacagtgtcaggtctacgcaccagaaagctggatgccagtattaagtcagaaaaccttcaatcgactggcagaacaagattggcaaaagttatataacgcccgaatcatcaccgaagatggacgtatctgcacactggcttatcgccgctgggtacaaagccaaaaggcaatccctcaactcattagcctgttaaacaacggaccccgtttacctcctcacagcctgacattgacgacggatcgttatgatcacgatcctgagcaacagatccgtcaacaggtggtattcagtgatggctttggccgcttgctgcaagccgctgcccgacatgaggcaggcatggcccggcaacgcaatgaagacggctctttgattataaatgtccagcatactgagaaccgttgggcagtgactggacgaacggaatatgacaataaggggcaaccgatacgtacctatcagccctatttcctcaatgactggcgatacgtcagcaatgatagtgcccggcaggaaaaagaagcttatgcagatacccatgtctatgatcccataggtcgagaaatcaaggttatcaccgcaaaaggttggttccgtcgaaccttgttcactccctggtttactgtcaatgaagatgaaaatgacacagccgctgaggtgaagaaggtaaagatgccgggatctaggcctatgaaaaacatcgatcccaaactttatcaaaaaacccctactgtcagcgtttacgataaccgtggtctgataatccgtaacatcgattttcatcgtactaccgcaaatggtgatcccgatacccgtattacccgccatcaatacgatattcacggacacctaaatcaaagcatcgatccgcgcctatatgaagccaagcaaaccaacaatacgatcaaacccaattttctttggcagtatgatttgaccggtaatcccctatgtacagagagcattgatgcaggtcgcactgtcaccttgaatgatattgaaggccgtccgctactaacggtgactgcaacaggggttatacaaactcgacaatatgaaacttcttccctgcccggtcgtctgttatctgttgccgaacaaacacccgaggaaaaaacatcccgtatcaccgaacgcctgatttgggctggcaataccgaagcagagaaagaccataaccttgccggccagtgcgtgcgtcactatgacacggcgggagttacccggttagagagtttatcactgaccggtactgttttatctcaatccagccaactattgatcgacactcaagaggcaaactggacaggtgataacgaaaccgtctggcaaaacatgctggctgatgacatctacacaaccctgagcaccttcgatgccaccggtgctttactgactcagaccgatgcgaaagggaacattcagagactggcttatgatgtggccgggcagctaaacgggagctggctaacactcaaaggccagacggaacaagtgattatcaaatccctgacctactccgccgccggacaaaaattacgtgaggaacacggcaatgatgttatcaccgaatacagttatgaaccggaaacccaacggctgatcggtatcaaaacccgccgtccgtcagacactaaagtgctacaagacctgcgctatgaatatgacccggtaggcaatgtcatcagcatccgtaatgacgcggaagccacccgcttttggcacaatcagaaagtgatgccggaaaacacttatacctacgattccctgtatcagcttatcagcgccaccgggcgcgaaatggcgaatataggtcaacaaagtcaccaatttccctcacccgctctaccttctgataacaacacctataccaactatacccgtacttatacttatgaccgtggcggcaatctgaccaaaatccagcacagttcaccggcgacgcaaaacaactacaccaccaatatcacggtttcaaatcgcagcaaccgcgcagtactcagcacattgaccgaagatccggcgcaagtagatgctttgtttgatgcaggcggacatcagaacaccttgatatcaggacaaaacctgaactggaatactcgtggtgaactgcaacaagtaacactggttaaacgggacaagggcgccaatgatgatcgggaatggtatcgttatagcggtgacggaagaaggatgttaaaaatcaatgaacagcaggccagcaacaacgctcaaacacaacgtgtgacttatttgccgaacttagaacttcgtctaacacaaaacagcacggccacaaccgaagatttgcaagttatcaccgtaggcgaagcgggccgggcacaggtacgagtattacattgggagagcggtaaaccggaagatatcgacaataatcagttgcgttatagttacgataatcttatcggttccagtcaacttgaattagatagcgaaggacaaattatcagtgaagaagaatattatccctatggtggaacagcattatgggccgccaggaatcagacagaagccagttataaaactatccgttattcaggcaaagagcgggatgccaccgggctatattactacggctatcggtattaccaaccgtggataggacggtggttaagctccgatccggcaggaacaatcgatgggctgaatttatatcggatggtgaggaataatccagttaccctccttgatcctgatggattaatgccaacaattgcagaacgcatagcagcactaaaaaaaaataaagtaacagactcagcgccttcgccagcaaatgccacaaacgtagcgataaacatccgcccgcctgtagcaccaaaacctagcttaccgaaagcatcaacgagtagccaaccaaccacacaccctatcggagctgcaaacataaaaccaacgacgtctgggtcatctattgttgctccattgagtccagtaggaaataaatctacttctgaaatctctctgccagaaagcgctcaaagcagttcttcaagcactacctcgacaaatctacagaaaaaatcatttactttatatagagcagataacagatcctttgaagaaatgcaaagtaaattccctgaaggatttaaagcctggactcctctagacactaagatggcaaggcaatttgctagtatctttattggtcagaaagatacatctaatttacctaaagaaacagtcaagaacataagcacatggggagcaaagccaaaactaaaagatctctcaaattacataaaatataccaaggacaaatctacagtatgggtttctactgcaattaatactgaagcaggtggacaaagctcaggggctccactccataaaattgatatggatctctacgagtttgccattgatggacaaaaactaaatccactaccggagggtagaactaaaaacatggtaccttcccttttactcgacaccccacaaatagagacatcatccatcattgcacttaatcatggaccggtaaatgatgcagaaatttcatttctgacaacaattccgcttaaaaatgtaaaacctcataagagataattaatctgactcgag

SEQ ID NO: 50 - protein, 2439 aa, Artificial Sequence
  TcdB2/TccC3 fusion protein pDAB8940
MQNSQDFSITELSLPKGGGAITGMGEALTPTGPDGMAALSLPLPISAGRGYAPAFTLNYNSGAGNSPFGLGWDCNVMTIRRRTHFGVPHYDETDTFLGPEGEVLVVADQPRDESTLQGINLGATFTVTGYRSRLESHFSRLEYWQPKTTGKTDFWLIYSPDGQVHLLGKSPQARISNPSQTTQTAQWLLEASVSSRGEQIYYQYRAEDDTGCEADEITHHLQATAQRYLHIVYYGNRTASETLPGLDGSAPSQADWLFYLVFDYGERSNNLKTPPAFSTTGSWLCRQDRFSRYEYGFEIRTRRLCRQVLMYHHLQALDSKITEHNGPTLVSRLILNYDESAIASTLVFVRRVGHEQDGNVVTLPPLELAYQDFSPRHHAHWQPMDVLANFNAIQRWQLVDLKGEGLPGLLYQDKGAWWYRSAQRLGEIGSDAVTWEKMQPLSVIPSLQSNASLVDINGDGQLDWVITGPGLRGYHSQRPDGSWTRFTPLNALPVEYTHPRAQLADLMGAGLSDLVLIGPKSVRLYANTRDGFAKGKDVVQSGDITLPVPGADPRKLVAFSDVLGSGQAHLVEVSATKVTCWPNLGRGRFGQPITLPGFSQPATEFNPAQVYLADLDGSGPTDLIYVHTNRLDIFLNKSGNGFAEPVTLRFPEGLRFDHTCQLQMADVQGLGVASLILSVPHMSPHHWRCDLTNMKPWLLNEMNNNMGVHHTLRYRSSSQFWLDEKAAALTTGQTPVCYLPFPIHTLWQTETEDEISGNKLVTTLRYARGAWDGREREFRGFGYVEQTDSHQLAQGNAPERTPPALTKNWYATGLPVIDNALSTEYWRDDQAFAGFSPRFTTWQDNKDVPLTPEDDNSRYWFNRALKGQLLRSELYGLDDSTNKHVPYTVTEFRSQVRRLQHTDSRYPVLWSSVVESRNYHYERIASDPQCSQNITLSSDRFGQPLKQLSVQYPRRQQPAINLYPDTLPDKLLANSYDDQQRQLRLTYQQSSWHHLTNNTVRVLGLPDSTRSDIFTYGAENVPAGGLNLELLSDKNSLIADDKPREYLGQQKTAYTDGQNTTPLQTPTRQALIAFTETTVFNQSTLSAFNGSIPSDKLSTTLEQAGYQQTNYLFPRTGEDKVWVAHHGYTDYGTAAQFWRPQKQSNTQLTGKITLIWDANYCVVVQTRDAAGLTTSAKYDWRFLTPVQLTDINDNQHLITLDALGRPITLRFWGTENGKMTGYSSPEKASFSPPSDVNAAIELKKPLPVAQCQVYAPESWMPVLSQKTFNRLAEQDWQKLYNARIITEDGRICTLAYRRWVQSQKAIPQLISLLNNGPRLPPHSLTLTTDRYDHDPEQQIRQQVVFSDGFGRLLQAAARHEAGMARQRNEDGSLIINVQHTENRWAVTGRTEYDNKGQPIRTYQPYFLNDWRYVSNDSARQEKEAYADTHVYDPIGREIKVITAKGWFRRTLFTPWFTVNEDENDTAAEVKKVKMPGSRPMKNIDPKLYQKTPTVSVYDNRGLIIRNIDFHRTTANGDPDTRITRHQYDIHGHLNQSIDPRLYEAKQTNNTIKPNFLWQYDLTGNPLCTESIDAGRTVTLNDIEGRPLLTVTATGVIQTRQYETSSLPGRLLSVAEQTPEEKTSRITERLIWAGNTEAEKDHNLAGQCVRHYDTAGVTRLESLSLTGTVLSQSSQLLIDTQEANWTGDNETVWQNMLADDIYTTLSTFDATGALLTQTDAKGNIQRLAYDVAGQLNGSWLTLKGQTEQVIIKSLTYSAAGQKLREEHGNDVITEYSYEPETQRLIGIKTRRPSDTKVLQDLRYEYDPVGNVISIRNDAEATRFWHNQKVMPENTYTYDSLYQLISATGREMANIGQQSHQFPSPALPSDNNTYTNYTRTYTYDRGGNLTKIQHSSPATQNNYTTNITVSNRSNRAVLSTLTEDPAQVDALFDAGGHQNTLISGQNLNWNTRGELQQVTLVKRDKGANDDREWYRYSGDGRRMLKINEQQASNNAQTQRVTYLPNLELRLTQNSTATTEDLQVITVGEAGRAQVRVLHWESGKPEDIDNNQLRYSYDNLIGSSQLELDSEGQIISEEEYYPYGGTALWAARNQTEASYKTIRYSGKERDATGLYYYGYRYYQPWIGRWLSSDPAGTIDGLNLYRMVRNNPVTLLDPDGLMPTIAERIAALKKNKVTDSAPSPANATNVAINIRPPVAPKPSLPKASTSSQPTTHPIGAANIKPTTSGSSIVAPLSPVGNKSTSEISLPESAQSSSSSTTSTNLQKKSFTLYRADNRSFEEMQSKFPEGFKAWTPLDTKMARQFASIFIGQKDTSNLPKETVKNISTWGAKPKLKDLSNYIKYTKDKSTVWVSTAINTEAGGQSSGAPLHKIDMDLYEFAIDGQKLNPLPEGRTKNMVPSLLLDTPQIETSSIIALNHGPVNDAEISFLTTIPLKNVKPHKR

SEQ ID NO: 51 - DNA, 7409 bp, Artificial Sequence; identical to SEQ ID NO: 1
  Nucleic acid sequence encoding TcdB2/TccC3 fusion protein pDAB8920

SEQ ID NO: 52 - protein, 2448 aa, Artificial Sequence; identical to SEQ ID NO: 2
  TcdB2/TccC3 fusion protein pDAB8920

SEQ ID NO: 53 - DNA, 7481 bp, Artificial Sequence
  Nucleic acid sequence encoding TcdB2/TccC3 fusion protein pDAB8921
tctagactgagtcgacgcactactagtaacaaagaaggagatataccatgcaaaattcacaagattttagtattacggaactgtcactgcccaaaggggggggcgctatcacgggaatgggtgaagcattaacccccactggaccggatggtatggccgcgctatctctaccattgcctatttctgccgggcgcggttatgctcccgcattcactctgaattacaacagcggcgccggtaacagtccatttggtctgggttgggattgcaacgttatgactatccgccgccgcacccattttggcgtcccccattatgacgaaaccgatacctttttggggccagaaggcgaagtgctggtggtagcggatcaacctcgcgacgaatccacattacagggtatcaatttaggcgccacctttaccgttaccggctaccgttcccgtctggaaagccatttcagccgattggaatattggcaacccaaaacaacaggtaaaacagatttttggttgatatatagcccagatgggcaggtgcatctactgggtaaatcaccgcaagcgcggatcagcaacccatcccaaacgacacaaacagcacaatggctgctggaagcctctgtatcatcacgtggcgaacaaatttattatcaatatcgcgccgaagatgacacaggttgcgaagcagatgaaattacgcaccatttacaggctacagcgcaacgttatttacacatcgtgtattacggcaaccgtacagccagcgaaacattacccggtctggatggcagcgccccatcacaagcagactggttgttctatctggtatttgattacggcgaacgcagtaacaacctgaaaacgccaccagcattttcgactacaggtagctggctttgccgtcaggaccgtttttcccgttatgaatatggctttgagattcgtacccgccgcttatgccgtcaggtattgatgtaccatcacctgcaagcactggatagtaagataacagaacacaacggaccaacgctggtttcacgcctgatactcaattacgacgaaagcgcgatagccagcacgctagtattcgttcgccgagtgggacacgagcaagatggtaatgtcgtcaccctgccgccattagaattggcatatcaggatttttcaccgcgacatcacgctcactggcaaccaatggatgtactggcaaacttcaatgccattcagcgctggcagctagtcgatctaaaaggcgaaggattacccggcctgttatatcaggataaaggcgcttggtggtaccgctccgcacagcgtctgggcgaaattggctcagatgccgtcacttgggaaaagatgcaacctttatcggttattccttctttgcaaagtaatgcctcgttggtggatatcaatggagacggccaacttgactgggttatcaccggaccgggattacggggatatcatagtcaacgcccggatggcagttggacacgttttaccccactcaacgctctgccggtggaatacacccatccacgcgcgcaactcgcagatttaatgggagccgggctatccgatttggtgctgatcggccctaagagcgtgcgtttatatgccaatacccgcgacggctttgccaaaggaaaagatgtggtgcaatccggtgatatcacactgccggtgccgggcgccgatccacgtaagttggtggcgtttagtgatgtattgggttcaggtcaagcccatctggttgaagtaagcgcgactaaagtcacctgctggcctaatctggggcgcggacgttttggtcaacccattaccttaccgggattcagccagccagcaaccgagtttaacccggctcaagtttatctggccgatctggatggcagcggtccaacggatctgatttatgttcatacaaaccgtctggatatcttcctgaacaaaagtggcaatggctttgctgaaccagtgacattacgcttcccggaaggtctgcgttttgatcatacctgtcagttacaaatggccgatgtacaaggattaggcgtcgccagcctgatactgagcgtgccgcatatgtctccccatcactggcgctgcgatctgaccaacatgaagccgtggttactcaatgaaatgaacaacaatatgggggtccatcacaccttgcgttaccgcagttcctcccaattctggctggatgaaaaagccgcggcgctgactaccggacaaacaccggtttgctatctccccttcccgatccacaccctatggcaaacggaaacagaagatgaaatcagcggcaacaaattagtcacaacacttcgttatgctcgtggcgcatgggacggacgcgagcgggaatttcgcggatttggttatgtagagcagacagacagccatcaactggctcaaggcaacgcgccagaacgtacgccaccggcgctgaccaaaaactggtatgccaccggactgccggtgatagataacgcattatcaaccgagtattggcgtgatgatcaggcttttgccggtttctcaccgcgctttacgacttggcaagataacaaagatgtcccgttaacaccggaagatgataacagtcgttactggttcaaccgcgcgttgaaaggtcaactgctacgtagtgaactgtacggattggacgatagtacaaataaacacgttccctatactgtcactgaatttcgttcacaggtacgtcgattacagcataccgacagccgataccctgtactttggtcatctgtagttgaaagccgcaactatcactacgaacgtatcgccagcgacccgcaatgcagtcaaaatattacgctatccagtgatcgatttggtcagccgctaaaacagctttcggtacagtacccgcgccgccagcagccagcaatcaatctgtatcctgatacattgcctgataagttgttagccaacagctatgatgaccaacaacgccaattacggctcacctatcaacaatccagttggcatcacctgaccaacaataccgttcgagtattgggattaccggatagtacccgcagtgatatctttacttatggcgctgaaaatgtgcctgctggtggtttaaatctggaacttctgagtgataaaaatagcctgatcgcggacgataaaccacgtgaatacctcggtcagcaaaaaaccgcttataccgatggacaaaatacaacgccgttgcaaacaccaacacggcaagccctgattgcctttaccgaaacaacggtattcaaccagtccacattatcagcgtttaacggaagcatcccgtccgataaattatcaacgacgctggagcaagctggatatcagcaaacaaattatctattccctcgcactggagaagataaagtttgggtagcccatcacggctataccgattatggtacagcggcacagttctggcgcccgcaaaaacagagcaacacccaactcaccggtaaaatcaccctcatctgggatgcaaactattgcgttgtggtacaaacccgggatgctgctggactgacaacctcagccaaatatgactggcgttttctgaccccggtgcaactcaccgatatcaatgacaatcagcaccttatcacactggatgcattgggccgaccaatcacattgcgcttttggggaactgaaaacggcaagatgacaggttattcctcaccggaaaaagcatcattttctccaccatccgatgttaatgccgctattgagttaaaaaaaccgctccctgtagcacagtgtcaggtctacgcaccagaaagctggatgccagtattaagtcagaaaaccttcaatcgactggcagaacaagattggcaaaagttatataacgcccgaatcatcaccgaagatggacgtatctgcacactggcttatcgccgctgggtacaaagccaaaaggcaatccctcaactcattagcctgttaaacaacggaccccgtttacctcctcacagcctgacattgacgacggatcgttatgatcacgatcctgagcaacagatccgtcaacaggtggtattcagtgatggctttggccgcttgctgcaagccgctgcccgacatgaggcaggcatggcccggcaacgcaatgaagacggctctttgattataaatgtccagcatactgagaaccgttgggcagtgactggacgaacggaatatgacaataaggggcaaccgatacgtacctatcagccctatttcctcaatgactggcgatacgtcagcaatgatagtgcccggcaggaaaaagaagcttatgcagatacccatgtctatgatcccataggtcgagaaatcaaggttatcaccgcaaaaggttggttccgtcgaaccttgttcactccctggtttactgtcaatgaagatgaaaatgacacagccgctgaggtgaagaaggtaaagatgccacgtctggaccgcgcagcagatatcactacccaaaatgctcacgacagcgcaattgtcgctctgcgtcagaatattcctactccggcacctctgtccctgcgcagcaggcctatgaaaaacatcgatcccaaactttatcaaaaaacccctactgtcagcgtttacgataaccgtggtctgataatccgtaacatcgattttcatcgtactaccgcaaatggtgatcccgatacccgtattacccgccatcaatacgatattcacggacacctaaatcaaagcatcgatccgcgcctatatgaagccaagcaaaccaacaatacgatcaaacccaattttctttggcagtatgatttgaccggtaatcccctatgtacagagagcattgatgcaggtcgcactgtcaccttgaatgatattgaaggccgtccgctactaacggtgactgcaacaggggttatacaaactcgacaatatgaaacttcttccctgcccggtcgtctgttatctgttgccgaacaaacacccgaggaaaaaacatcccgtatcaccgaacgcctgatttgggctggcaataccgaagcagagaaagaccataaccttgccggccagtgcgtgcgtcactatgacacggcgggagttacccggttagagagtttatcactgaccggtactgttttatctcaatccagccaactattgatcgacactcaagaggcaaactggacaggtgataacgaaaccgtctggcaaaacatgctggctgatgacatctacacaaccctgagcaccttcgatgccaccggtgctttactgactcagaccgatgcgaaagggaacattcagagactggcttatgatgtggccgggcagctaaacgggagctggctaacactcaaaggccagacggaacaagtgattatcaaatccctgacctactccgccgccggacaaaaattacgtgaggaacacggcaatgatgttatcaccgaatacagttatgaaccggaaacccaacggctgatcggtatcaaaacccgccgtccgtcagacactaaagtgctacaagacctgcgctatgaatatgacccggtaggcaatgtcatcagcatccgtaatgacgcggaagccacccgcttttggcacaatcagaaagtgatgccggaaaacacttatacctacgattccctgtatcagcttatcagcgccaccgggcgcgaaatggcgaatataggtcaacaaagtcaccaatttccctcacccgctctaccttctgataacaacacctataccaactatacccgtacttatacttatgaccgtggcggcaatctgaccaaaatccagcacagttcaccggcgacgcaaaacaactacaccaccaatatcacggtttcaaatcgcagcaaccgcgcagtactcagcacattgaccgaagatccggcgcaagtagatgctttgtttgatgcaggcggacatcagaacaccttgatatcaggacaaaacctgaactggaatactcgtggtgaactgcaacaagtaacactggttaaacgggacaagggcgccaatgatgatcgggaatggtatcgttatagcggtgacggaagaaggatgttaaaaatcaatgaacagcaggccagcaacaacgctcaaacacaacgtgtgacttatttgccgaacttagaacttcgtctaacacaaaacagcacggccacaaccgaagatttgcaagttatcaccgtaggcgaagcgggccgggcacaggtacgagtattacattgggagagcggtaaaccggaagatatcgacaataatcagttgcgttatagttacgataatcttatcggttccagtcaacttgaattagatagcgaaggacaaattatcagtgaagaagaatattatccctatggtggaacagcattatgggccgccaggaatcagacagaagccagttataaaactatccgttattcaggcaaagagcgggatgccaccgggctatattactacggctatcggtattaccaaccgtggataggacggtggttaagctccgatccggcaggaacaatcgatgggctgaatttatatcggatggtgaggaataatccagttaccctccttgatcctgatggattaatgccaacaattgcagaacgcatagcagcactaaaaaaaaataaagtaacagactcagcgccttcgccagcaaatgccacaaacgtagcgataaacatccgcccgcctgtagcaccaaaacctagcttaccgaaagcatcaacgagtagccaaccaaccacacaccctatcggagctgcaaacataaaaccaacgacgtctgggtcatctattgttgctccattgagtccagtaggaaataaatctacttctgaaatctctctgccagaaagcgctcaaagcagttcttcaagcactacctcgacaaatctacagaaaaaatcatttactttatatagagcagataacagatcctttgaagaaatgcaaagtaaattccctgaaggatttaaagcctggactcctctagacactaagatggcaaggcaatttgctagtatctttattggtcagaaagatacatctaatttacctaaagaaacagtcaagaacataagcacatggggagcaaagccaaaactaaaagatctctcaaattacataaaatataccaaggacaaatctacagtatgggtttctactgcaattaatactgaagcaggtggacaaagctcaggggctccactccataaaattgatatggatctctacgagtttgccattgatggacaaaaactaaatccactaccggagggtagaactaaaaacatggtaccttcccttttactcgacaccccacaaatagagacatcatccatcattgcacttaatcatggaccggtaaatgatgcagaaatttcatttctgacaacaattccgcttaaaaatgtaaaacctcataagagataattaatctgactcgag

SEQ ID NO: 54 - protein, 2472 aa, Artificial Sequence
  TcdB2/TccC3 fusion protein pDAB8921
MQNSQDFSITELSLPKGGGAITGMGEALTPTGPDGMAALSLPLPISAGRGYAPAFTLNYNSGAGNSPFGLGWDCNVMTIRRRTHFGVPHYDETDTFLGPEGEVLVVADQPRDESTLQGINLGATFTVTGYRSRLESHFSRLEYWQPKTTGKTDFWLIYSPDGQVHLLGKSPQARISNPSQTTQTAQWLLEASVSSRGEQIYYQYRAEDDTGCEADEITHHLQATAQRYLHIVYYGNRTASETLPGLDGSAPSQADWLFYLVFDYGERSNNLKTPPAFSTTGSWLCRQDRFSRYEYGFEIRTRRLCRQVLMYHHLQALDSKITEHNGPTLVSRLILNYDESAIASTLVFVRRVGHEQDGNVVTLPPLELAYQDFSPRHHAHWQPMDVLANFNAIQRWQLVDLKGEGLPGLLYQDKGAWWYRSAQRLGEIGSDAVTWEKMQPLSVIPSLQSNASLVDINGDGQLDWVITGPGLRGYHSQRPDGSWTRFTPLNALPVEYTHPRAQLADLMGAGLSDLVLIGPKSVRLYANTRDGFAKGKDVVQSGDITLPVPGADPRKLVAFSDVLGSGQAHLVEVSATKVTCWPNLGRGRFGQPITLPGFSQPATEFNPAQVYLADLDGSGPTDLIYVHTNRLDIFLNKSGNGFAEPVTLRFPEGLRFDHTCQLQMADVQGLGVASLILSVPHMSPHHWRCDLTNMKPWLLNEMNNNMGVHHTLRYRSSSQFWLDEKAAALTTGQTPVCYLPFPIHTLWQTETEDEISGNKLVTTLRYARGAWDGREREFRGFGYVEQTDSHQLAQGNAPERTPPALTKNWYATGLPVIDNALSTEYWRDDQAFAGFSPRFTTWQDNKDVPLTPEDDNSRYWFNRALKGQLLRSELYGLDDSTNKHVPYTVTEFRSQVRRLQHTDSRYPVLWSSVVESRNYHYERIASDPQCSQNITLSSDRFGQPLKQLSVQYPRRQQPAINLYPDTLPDKLLANSYDDQQRQLRLTYQQSSWHHLTNNTVRVLGLPDSTRSDIFTYGAENVPAGGLNLELLSDKNSLIADDKPREYLGQQKTAYTDGQNTTPLQTPTRQALIAFTETTVFNQSTLSAFNGSIPSDKLSTTLEQAGYQQTNYLFPRTGEDKVWVAHHGYTDYGTAAQFWRPQKQSNTQLTGKITLIWDANYCVVVQTRDAAGLTTSAKYDWRFLTPVQLTDINDNQHLITLDALGRPITLRFWGTENGKMTGYSSPEKASFSPPSDVNAAIELKKPLPVAQCQVYAPESWMPVLSQKTFNRLAEQDWQKLYNARIITEDGRICTLAYRRWVQSQKAIPQLISLLNNGPRLPPHSLTLTTDRYDHDPEQQIRQQVVFSDGFGRLLQAAARHEAGMARQRNEDGSLIINVQHTENRWAVTGRTEYDNKGQPIRTYQPYFLNDWRYVSNDSARQEKEAYADTHVYDPIGREIKVITAKGWFRRTLFTPWFTVNEDENDTAAEVKKVKMPRLDRAADITTQNAHDSAIVALRQNIPTPAPLSLRSRPMKNIDPKLYQKTPTVSVYDNRGLIIRNIDFHRTTANGDPDTRITRHQYDIHGHLNQSIDPRLYEAKQTNNTIKPNFLWQYDLTGNPLCTESIDAGRTVTLNDIEGRPLLTVTATGVIQTRQYETSSLPGRLLSVAEQTPEEKTSRITERLIWAGNTEAEKDHNLAGQCVRHYDTAGVTRLESLSLTGTVLSQSSQLLIDTQEANWTGDNETVWQNMLADDIYTTLSTFDATGALLTQTDAKGNIQRLAYDVAGQLNGSWLTLKGQTEQVIIKSLTYSAAGQKLREEHGNDVITEYSYEPETQRLIGIKTRRPSDTKVLQDLRYEYDPVGNVISIRNDAEATRFWHNQKVMPENTYTYDSLYQLISATGREMANIGQQSHQFPSPALPSDNNTYTNYTRTYTYDRGGNLTKIQHSSPATQNNYTTNITVSNRSNRAVLSTLTEDPAQVDALFDAGGHQNTLISGQNLNWNTRGELQQVTLVKRDKGANDDREWYRYSGDGRRMLKINEQQASNNAQTQRVTYLPNLELRLTQNSTATTEDLQVITVGEAGRAQVRVLHWESGKPEDIDNNQLRYSYDNLIGSSQLELDSEGQIISEEEYYPYGGTALWAARNQTEASYKTIRYSGKERDATGLYYYGYRYYQPWIGRWLSSDPAGTIDGLNLYRMVRNNPVTLLDPDGLMPTIAERIAALKKNKVTDSAPSPANATNVAINIRPPVAPKPSLPKASTSSQPTTHPIGAANIKPTTSGSSIVAPLSPVGNKSTSEISLPESAQSSSSSTTSTNLQKKSFTLYRADNRSFEEMQSKFPEGFKAWTPLDTKMARQFASIFIGQKDTSNLPKETVKNISTWGAKPKLKDLSNYIKYTKDKSTVWVSTAINTEAGGQSSGAPLHKIDMDLYEFAIDGQKLNPLPEGRTKNMVPSLLLDTPQIETSSIIALNHGPVNDAEISFLTTIPLKNVKPHKR

SEQ ID NO: 55 - DNA, 7646 bp, Artificial Sequence
  Nucleic acid sequence encoding TcdB2/TccC3 fusion protein pDAB8923
tctagactgagtcgacgcactactagtaacaaagaaggagatataccatgcaaaattcacaagattttagtattacggaactgtcactgcccaaaggggggggcgctatcacgggaatgggtgaagcattaacccccactggaccggatggtatggccgcgctatctctaccattgcctatttctgccgggcgcggttatgctcccgcattcactctgaattacaacagcggcgccggtaacagtccatttggtctgggttgggattgcaacgttatgactatccgccgccgcacccattttggcgtcccccattatgacgaaaccgatacctttttggggccagaaggcgaagtgctggtggtagcggatcaacctcgcgacgaatccacattacagggtatcaatttaggcgccacctttaccgttaccggctaccgttcccgtctggaaagccatttcagccgattggaatattggcaacccaaaacaacaggtaaaacagatttttggttgatatatagcccagatgggcaggtgcatctactgggtaaatcaccgcaagcgcggatcagcaacccatcccaaacgacacaaacagcacaatggctgctggaagcctctgtatcatcacgtggcgaacaaatttattatcaatatcgcgccgaagatgacacaggttgcgaagcagatgaaattacgcaccatttacaggctacagcgcaacgttatttacacatcgtgtattacggcaaccgtacagccagcgaaacattacccggtctggatggcagcgccccatcacaagcagactggttgttctatctggtatttgattacggcgaacgcagtaacaacctgaaaacgccaccagcattttcgactacaggtagctggctttgccgtcaggaccgtttttcccgttatgaatatggctttgagattcgtacccgccgcttatgccgtcaggtattgatgtaccatcacctgcaagcactggatagtaagataacagaacacaacggaccaacgctggtttcacgcctgatactcaattacgacgaaagcgcgatagccagcacgctagtattcgttcgccgagtgggacacgagcaagatggtaatgtcgtcaccctgccgccattagaattggcatatcaggatttttcaccgcgacatcacgctcactggcaaccaatggatgtactggcaaacttcaatgccattcagcgctggcagctagtcgatctaaaaggcgaaggattacccggcctgttatatcaggataaaggcgcttggtggtaccgctccgcacagcgtctgggcgaaattggctcagatgccgtcacttgggaaaagatgcaacctttatcggttattccttctttgcaaagtaatgcctcgttggtggatatcaatggagacggccaacttgactgggttatcaccggaccgggattacggggatatcatagtcaacgcccggatggcagttggacacgttttaccccactcaacgctctgccggtggaatacacccatccacgcgcgcaactcgcagatttaatgggagccgggctatccgatttggtgctgatcggccctaagagcgtgcgtttatatgccaatacccgcgacggctttgccaaaggaaaagatgtggtgcaatccggtgatatcacactgccggtgccgggcgccgatccacgtaagttggtggcgtttagtgatgtattgggttcaggtcaagcccatctggttgaagtaagcgcgactaaagtcacctgctggcctaatctggggcgcggacgttttggtcaacccattaccttaccgggattcagccagccagcaaccgagtttaacccggctcaagtttatctggccgatctggatggcagcggtccaacggatctgatttatgttcatacaaaccgtctggatatcttcctgaacaaaagtggcaatggctttgctgaaccagtgacattacgcttcccggaaggtctgcgttttgatcatacctgtcagttacaaatggccgatgtacaaggattaggcgtcgccagcctgatactgagcgtgccgcatatgtctccccatcactggcgctgcgatctgaccaacatgaagccgtggttactcaatgaaatgaacaacaatatgggggtccatcacaccttgcgttaccgcagttcctcccaattctggctggatgaaaaagccgcggcgctgactaccggacaaacaccggtttgctatctccccttcccgatccacaccctatggcaaacggaaacagaagatgaaatcagcggcaacaaattagtcacaacacttcgttatgctcgtggcgcatgggacggacgcgagcgggaatttcgcggatttggttatgtagagcagacagacagccatcaactggctcaaggcaacgcgccagaacgtacgccaccggcgctgaccaaaaactggtatgccaccggactgccggtgatagataacgcattatcaaccgagtattggcgtgatgatcaggcttttgccggtttctcaccgcgctttacgacttggcaagataacaaagatgtcccgttaacaccggaagatgataacagtcgttactggttcaaccgcgcgttgaaaggtcaactgctacgtagtgaactgtacggattggacgatagtacaaataaacacgttccctatactgtcactgaatttcgttcacaggtacgtcgattacagcataccgacagccgataccctgtactttggtcatctgtagttgaaagccgcaactatcactacgaacgtatcgccagcgacccgcaatgcagtcaaaatattacgctatccagtgatcgatttggtcagccgctaaaacagctttcggtacagtacccgcgccgccagcagccagcaatcaatctgtatcctgatacattgcctgataagttgttagccaacagctatgatgaccaacaacgccaattacggctcacctatcaacaatccagttggcatcacctgaccaacaataccgttcgagtattgggattaccggatagtacccgcagtgatatctttacttatggcgctgaaaatgtgcctgctggtggtttaaatctggaacttctgagtgataaaaatagcctgatcgcggacgataaaccacgtgaatacctcggtcagcaaaaaaccgcttataccgatggacaaaatacaacgccgttgcaaacaccaacacggcaagccctgattgcctttaccgaaacaacggtattcaaccagtccacattatcagcgtttaacggaagcatcccgtccgataaattatcaacgacgctggagcaagctggatatcagcaaacaaattatctattccctcgcactggagaagataaagtttgggtagcccatcacggctataccgattatggtacagcggcacagttctggcgcccgcaaaaacagagcaacacccaactcaccggtaaaatcaccctcatctgggatgcaaactattgcgttgtggtacaaacccgggatgctgctggactgacaacctcagccaaatatgactggcgttttctgaccccggtgcaactcaccgatatcaatgacaatcagcaccttatcacactggatgcattgggccgaccaatcacattgcgcttttggggaactgaaaacggcaagatgacaggttattcctcaccggaaaaagcatcattttctccaccatccgatgttaatgccgctattgagttaaaaaaaccgctccctgtagcacagtgtcaggtctacgcaccagaaagctggatgccagtattaagtcagaaaaccttcaatcgactggcagaacaagattggcaaaagttatataacgcccgaatcatcaccgaagatggacgtatctgcacactggcttatcgccgctgggtacaaagccaaaaggcaatccctcaactcattagcctgttaaacaacggaccccgtttacctcctcacagcctgacattgacgacggatcgttatgatcacgatcctgagcaacagatccgtcaacaggtggtattcagtgatggctttggccgcttgctgcaagccgctgcccgacatgaggcaggcatggcccggcaacgcaatgaagacggctctttgattataaatgtccagcatactgagaaccgttgggcagtgactggacgaacggaatatgacaataaggggcaaccgatacgtacctatcagccctatttcctcaatgactggcgatacgtcagcaatgatagtgcccggcaggaaaaagaagcttatgcagatacccatgtctatgatcccataggtcgagaaatcaaggttatcaccgcaaaaggttggttccgtcgaaccttgttcactccctggtttactgtcaatgaagatgaaaatgacacagccgctgaggtgaagaaggtaaagatgccgggatccgaagcttatgcagatacccatgtctatgatcccataggtcgagaaatcaaggttatcaccgcaaaaggttggttccgtcgaaccttgttcactccctggtttactgtcaatgaagatgaaaatgacacagccgctgaggtgaagaaggtaaagatgccacgtctggaccgcgcagcagatatcactacccaaaatgctcacgacagcgcaattgtcgctctgcgtcagaatattcctactccggcacctctgtccctgcgcagcaggcctatgaaaaacatcgatcccaaactttatcaaaaaacccctactgtcagcgtttacgataaccgtggtctgataatccgtaacatcgattttcatcgtactaccgcaaatggtgatcccgatacccgtattacccgccatcaatacgatattcacggacacctaaatcaaagcatcgatccgcgcctatatgaagccaagcaaaccaacaatacgatcaaacccaattttctttggcagtatgatttgaccggtaatcccctatgtacagagagcattgatgcaggtcgcactgtcaccttgaatgatattgaaggccgtccgctactaacggtgactgcaacaggggttatacaaactcgacaatatgaaacttcttccctgcccggtcgtctgttatctgttgccgaacaaacacccgaggaaaaaacatcccgtatcaccgaacgcctgatttgggctggcaataccgaagcagagaaagaccataaccttgccggccagtgcgtgcgtcactatgacacggcgggagttacccggttagagagtttatcactgaccggtactgttttatctcaatccagccaactattgatcgacactcaagaggcaaactggacaggtgataacgaaaccgtctggcaaaacatgctggctgatgacatctacacaaccctgagcaccttcgatgccaccggtgctttactgactcagaccgatgcgaaagggaacattcagagactggcttatgatgtggccgggcagctaaacgggagctggctaacactcaaaggccagacggaacaagtgattatcaaatccctgacctactccgccgccggacaaaaattacgtgaggaacacggcaatgatgttatcaccgaatacagttatgaaccggaaacccaacggctgatcggtatcaaaacccgccgtccgtcagacactaaagtgctacaagacctgcgctatgaatatgacccggtaggcaatgtcatcagcatccgtaatgacgcggaagccacccgcttttggcacaatcagaaagtgatgccggaaaacacttatacctacgattccctgtatcagcttatcagcgccaccgggcgcgaaatggcgaatataggtcaacaaagtcaccaatttccctcacccgctctaccttctgataacaacacctataccaactatacccgtacttatacttatgaccgtggcggcaatctgaccaaaatccagcacagttcaccggcgacgcaaaacaactacaccaccaatatcacggtttcaaatcgcagcaaccgcgcagtactcagcacattgaccgaagatccggcgcaagtagatgctttgtttgatgcaggcggacatcagaacaccttgatatcaggacaaaacctgaactggaatactcgtggtgaactgcaacaagtaacactggttaaacgggacaagggcgccaatgatgatcgggaatggtatcgttatagcggtgacggaagaaggatgttaaaaatcaatgaacagcaggccagcaacaacgctcaaacacaacgtgtgacttatttgccgaacttagaacttcgtctaacacaaaacagcacggccacaaccgaagatttgcaagttatcaccgtaggcgaagcgggccgggcacaggtacgagtattacattgggagagcggtaaaccggaagatatcgacaataatcagttgcgttatagttacgataatcttatcggttccagtcaacttgaattagatagcgaaggacaaattatcagtgaagaagaatattatccctatggtggaacagcattatgggccgccaggaatcagacagaagccagttataaaactatccgttattcaggcaaagagcgggatgccaccgggctatattactacggctatcggtattaccaaccgtggataggacggtggttaagctccgatccggcaggaacaatcgatgggctgaatttatatcggatggtgaggaataatccagttaccctccttgatcctgatggattaatgccaacaattgcagaacgcatagcagcactaaaaaaaaataaagtaacagactcagcgccttcgccagcaaatgccacaaacgtagcgataaacatccgcccgcctgtagcaccaaaacctagcttaccgaaagcatcaacgagtagccaaccaaccacacaccctatcggagctgcaaacataaaaccaacgacgtctgggtcatctattgttgctccattgagtccagtaggaaataaatctacttctgaaatctctctgccagaaagcgctcaaagcagttcttcaagcactacctcgacaaatctacagaaaaaatcatttactttatatagagcagataacagatcctttgaagaaatgcaaagtaaattccctgaaggatttaaagcctggactcctctagacactaagatggcaaggcaatttgctagtatctttattggtcagaaagatacatctaatttacctaaagaaacagtcaagaacataagcacatggggagcaaagccaaaactaaaagatctctcaaattacataaaatataccaaggacaaatctacagtatgggtttctactgcaattaatactgaagcaggtggacaaagctcaggggctccactccataaaattgatatggatctctacgagtttgccattgatggacaaaaactaaatccactaccggagggtagaactaaaaacatggtaccttcccttttactcgacaccccacaaatagagacatcatccatcattgcacttaatcatggaccggtaaatgatgcagaaatttcatttctgacaacaattccgcttaaaaatgtaaaacctcataagagataattaatctgactcgag

SEQ ID NO: 56 - protein, 2527 aa, Artificial Sequence
  TcdB2/TccC3 fusion protein pDAB8923
MQNSQDFSITELSLPKGGGAITGMGEALTPTGPDGMAALSLPLPISAGRGYAPAFTLNYNSGAGNSPFGLGWDCNVMTIRRRTHFGVPHYDETDTFLGPEGEVLVVADQPRDESTLQGINLGATFTVTGYRSRLESHFSRLEYWQPKTTGKTDFWLIYSPDGQVHLLGKSPQARISNPSQTTQTAQWLLEASVSSRGEQIYYQYRAEDDTGCEADEITHHLQATAQRYLHIVYYGNRTASETLPGLDGSAPSQADWLFYLVFDYGERSNNLKTPPAFSTTGSWLCRQDRFSRYEYGFEIRTRRLCRQVLMYHHLQALDSKITEHNGPTLVSRLILNYDESAIASTLVFVRRVGHEQDGNVVTLPPLELAYQDFSPRHHAHWQPMDVLANFNAIQRWQLVDLKGEGLPGLLYQDKGAWWYRSAQRLGEIGSDAVTWEKMQPLSVIPSLQSNASLVDINGDGQLDWVITGPGLRGYHSQRPDGSWTRFTPLNALPVEYTHPRAQLADLMGAGLSDLVLIGPKSVRLYANTRDGFAKGKDVVQSGDITLPVPGADPRKLVAFSDVLGSGQAHLVEVSATKVTCWPNLGRGRFGQPITLPGFSQPATEFNPAQVYLADLDGSGPTDLIYVHTNRLDIFLNKSGNGFAEPVTLRFPEGLRFDHTCQLQMADVQGLGVASLILSVPHMSPHHWRCDLTNMKPWLLNEMNNNMGVHHTLRYRSSSQFWLDEKAAALTTGQTPVCYLPFPIHTLWQTETEDEISGNKLVTTLRYARGAWDGREREFRGFGYVEQTDSHQLAQGNAPERTPPALTKNWYATGLPVIDNALSTEYWRDDQAFAGFSPRFTTWQDNKDVPLTPEDDNSRYWFNRALKGQLLRSELYGLDDSTNKHVPYTVTEFRSQVRRLQHTDSRYPVLWSSVVESRNYHYERIASDPQCSQNITLSSDRFGQPLKQLSVQYPRRQQPAINLYPDTLPDKLLANSYDDQQRQLRLTYQQSSWHHLTNNTVRVLGLPDSTRSDIFTYGAENVPAGGLNLELLSDKNSLIADDKPREYLGQQKTAYTDGQNTTPLQTPTRQALIAFTETTVFNQSTLSAFNGSIPSDKLSTTLEQAGYQQTNYLFPRTGEDKVWVAHHGYTDYGTAAQFWRPQKQSNTQLTGKITLIWDANYCVVVQTRDAAGLTTSAKYDWRFLTPVQLTDINDNQHLITLDALGRPITLRFWGTENGKMTGYSSPEKASFSPPSDVNAAIELKKPLPVAQCQVYAPESWMPVLSQKTFNRLAEQDWQKLYNARIITEDGRICTLAYRRWVQSQKAIPQLISLLNNGPRLPPHSLTLTTDRYDHDPEQQIRQQVVFSDGFGRLLQAAARHEAGMARQRNEDGSLIINVQHTENRWAVTGRTEYDNKGQPIRTYQPYFLNDWRYVSNDSARQEKEAYADTHVYDPIGREIKVITAKGWFRRTLFTPWFTVNEDENDTAAEVKKVKMPGSEAYADTHVYDPIGREIKVITAKGWFRRTLFTPWFTVNEDENDTAAEVKKVKMPRLDRAADITTQNAHDSAIVALRQNIPTPAPLSLRSRPMKNIDPKLYQKTPTVSVYDNRGLIIRNIDFHRTTANGDPDTRITRHQYDIHGHLNQSIDPRLYEAKQTNNTIKPNFLWQYDLTGNPLCTESIDAGRTVTLNDIEGRPLLTVTATGVIQTRQYETSSLPGRLLSVAEQTPEEKTSRITERLIWAGNTEAEKDHNLAGQCVRHYDTAGVTRLESLSLTGTVLSQSSQLLIDTQEANWTGDNETVWQNMLADDIYTTLSTFDATGALLTQTDAKGNIQRLAYDVAGQLNGSWLTLKGQTEQVIIKSLTYSAAGQKLREEHGNDVITEYSYEPETQRLIGIKTRRPSDTKVLQDLRYEYDPVGNVISIRNDAEATRFWHNQKVMPENTYTYDSLYQLISATGREMANIGQQSHQFPSPALPSDNNTYTNYTRTYTYDRGGNLTKIQHSSPATQNNYTTNITVSNRSNRAVLSTLTEDPAQVDALFDAGGHQNTLISGQNLNWNTRGELQQVTLVKRDKGANDDREWYRYSGDGRRMLKINEQQASNNAQTQRVTYLPNLELRLTQNSTATTEDLQVITVGEAGRAQVRVLHWESGKPEDIDNNQLRYSYDNLIGSSQLELDSEGQIISEEEYYPYGGTALWAARNQTEASYKTIRYSGKERDATGLYYYGYRYYQPWIGRWLSSDPAGTIDGLNLYRMVRNNPVTLLDPDGLMPTIAERIAALKKNKVTDSAPSPANATNVAINIRPPVAPKPSLPKASTSSQPTTHPIGAANIKPTTSGSSIVAPLSPVGNKSTSEISLPESAQSSSSSTTSTNLQKKSFTLYRADNRSFEEMQSKFPEGFKAWTPLDTKMARQFASIFIGQKDTSNLPKETVKNISTWGAKPKLKDLSNYIKYTKDKSTVWVSTAINTEAGGQSSGAPLHKIDMDLYEFAIDGQKLNPLPEGRTKNMVPSLLLDTPQIETSSIIALNHGPVNDAEISFLTTIPLKNVKPHKR

SEQ ID NO: 57 - DNA, 7454 bp, Artificial Sequence
  Nucleic acid sequence encoding TcdB2/TccC3 fusion protein pDAB8951
aaacaagaaggagatataccatgaaaaacatcgatcccaaactttatcaaaaaacccctactgtcagcgtttacgataaccgtggtctgataatccgtaacatcgattttcatcgtactaccgcaaatggtgatcccgatacccgtattacccgccatcaatacgatattcacggacacctaaatcaaagcatcgatccgcgcctatatgaagccaagcaaaccaacaatacgatcaaacccaattttctttggcagtatgatttgaccggtaatcccctatgtacagagagcattgatgcaggtcgcactgtcaccttgaatgatattgaaggccgtccgctactaacggtgactgcaacaggggttatacaaactcgacaatatgaaacttcttccctgcccggtcgtctgttatctgttgccgaacaaacacccgaggaaaaaacatcccgtatcaccgaacgcctgatttgggctggcaataccgaagcagagaaagaccataaccttgccggccagtgcgtgcgtcactatgacacggcgggagttacccggttagagagtttatcactgaccggtactgttttatctcaatccagccaactattgatcgacactcaagaggcaaactggacaggtgataacgaaaccgtctggcaaaacatgctggctgatgacatctacacaaccctgagcaccttcgatgccaccggtgctttactgactcagaccgatgcgaaagggaacattcagagactggcttatgatgtggccgggcagctaaacgggagctggctaacactcaaaggccagacggaacaagtgattatcaaatccctgacctactccgccgccggacaaaaattacgtgaggaacacggcaatgatgttatcaccgaatacagttatgaaccggaaacccaacggctgatcggtatcaaaacccgccgtccgtcagacactaaagtgctacaagacctgcgctatgaatatgacccggtaggcaatgtcatcagcatccgtaatgacgcggaagccacccgcttttggcacaatcagaaagtgatgccggaaaacacttatacctacgattccctgtatcagcttatcagcgccaccgggcgcgaaatggcgaatataggtcaacaaagtcaccaatttccctcacccgctctaccttctgataacaacacctataccaactatacccgtacttatacttatgaccgtggcggcaatctgaccaaaatccagcacagttcaccggcgacgcaaaacaactacaccaccaatatcacggtttcaaatcgcagcaaccgcgcagtactcagcacattgaccgaagatccggcgcaagtagatgctttgtttgatgcaggcggacatcagaacaccttgatatcaggacaaaacctgaactggaatactcgtggtgaactgcaacaagtaacactggttaaacgggacaagggcgccaatgatgatcgggaatggtatcgttatagcggtgacggaagaaggatgttaaaaatcaatgaacagcaggccagcaacaacgctcaaacacaacgtgtgacttatttgccgaacttagaacttcgtctaacacaaaacagcacggccacaaccgaagatttgcaagttatcaccgtaggcgaagcgggccgggcacaggtacgagtattacattgggagagcggtaaaccggaagatatcgacaataatcagttgcgttatagttacgataatcttatcggttccagtcaacttgaattagatagcgaaggacaaattatcagtgaagaagaatattatccctatggtggaacagcattatgggccgccaggaatcagacagaagccagttataaaactatccgttattcaggcaaagagcgggatgccaccgggctatattactacggctatcggtattaccaaccgtggataggacggtggttaagctccgatccggcaggaacaatcgatgggctgaatttatatcggatggtgaggaataatccagttaccctccttgatcctgatggattaatgccaacaattgcagaacgcatagcagcactaaaaaaaaataaagtaacagactcagcgccttcgccagcaaatgccacaaacgtagcgataaacatccgcccgcctgtagcaccaaaacctagcttaccgaaagcatcaacgagtagccaaccaaccacacaccctatcggagctgcaaacataaaaccaacgacgtctgggtcatctattgttgctccattgagtccagtaggaaataaatctacttctgaaatctctctgccagaaagcgctcaaagcagttcttcaagcactacctcgacaaatctacagaaaaaatcatttactttatatagagcagataacagatcctttgaagaaatgcaaagtaaattccctgaaggatttaaagcctggactcctctagacactaagatggcaaggcaatttgctagtatctttattggtcagaaagatacatctaatttacctaaagaaacagtcaagaacataagcacatggggagcaaagccaaaactaaaagatctctcaaattacataaaatataccaaggacaaatctacagtatgggtttctactgcaattaatactgaagcaggtggacaaagctcaggggctccactccataaaattgatatggatctctacgagtttgccattgatggacaaaaactaaatccactaccggagggtagaactaaaaacatggtaccttcccttttactcgacaccccacaaatagagacatcatccatcattgcacttaatcatggaccggtaaatgatgcagaaatttcatttctgacaacaattccgcttaagaatgtaaaacctcataagagaccacgtctggaccgcgcagcagatatcactacccaaaatgctcacgacagcgcaattgtcgctctgcgtcagaatattcctactccggcacctctgtccctgcgcagcaggcctatgcaaaattcacaagattttagtattacggagctctcactgcccaaaggggggggcgctatcacgggaatgggtgaagcattaacccccactggaccggatggtatggccgcgctatctctaccattgcctatttctgccgggcgcggttatgctcccgcattcactctgaattacaacagcggcgccggtaacagtccatttggtctgggttgggattgcaacgttatgactatccgccgccgcacccattttggcgtcccccattatgacgaaaccgatacctttttggggccagaaggcgaagtgctggtggtagcggatcaacctcgcgacgaatccacattacagggtatcaatttaggcgccacctttaccgttaccggctaccgttcccgtctggaaagccatttcagccgattggaatattggcaacccaaaacaacaggtaaaacagatttttggttgatatatagcccagatgggcaggtgcatctactgggtaaatcaccgcaagcgcggatcagcaacccatcccaaacgacacaaacagcacaatggctgctggaagcctctgtatcatcacgtggcgaacaaatttattatcaatatcgcgccgaagatgacacaggttgcgaagcagatgaaattacgcaccatttacaggctacagcgcaacgttatttacacatcgtgtattacggcaaccgtacagccagcgaaacattacccggtctggatggcagcgccccatcacaagcagactggttgttctatctggtatttgattacggcgaacgcagtaacaacctgaaaacgccaccagcattttcgactacaggtagctggctttgccgtcaggaccgtttttcccgttatgaatatggctttgagattcgtacccgccgcttatgccgtcaggtattgatgtaccatcacctgcaagcactggatagtaagataacagaacacaacggaccaacgctggtttcacgcctgatactcaattacgacgaaagcgcgatagccagcacgctagtattcgttcgccgagtgggacacgagcaagatggtaatgtcgtcaccctgccgccattagaattggcatatcaggatttttcaccgcgacatcacgctcactggcaaccaatggatgtactggcaaacttcaatgccattcagcgctggcagctagtcgatctaaaaggcgaaggattacccggcctgttatatcaggataaaggcgcttggtggtaccgctccgcacagcgtctgggcgaaattggctcagatgccgtcacttgggaaaagatgcaacctttatcggttattccttctttgcaaagtaatgcctcgttggtggatatcaatggagacggccaacttgactgggttatcaccggaccgggattacggggatatcatagtcaacgcccggatggcagttggacacgttttaccccactcaacgctctgccggtggaatacacccatccacgcgcgcaactcgcagatttaatgggagccgggctatccgatttggtgctgatcggccctaagagcgtgcgtttatatgccaatacccgcgacggctttgccaaaggaaaagatgtggtgcaatccggtgatatcacactgccggtgccgggcgccgatccacgtaagttggtggcgtttagtgatgtattgggttcaggtcaagcccatctggttgaagtaagcgcgactaaagtcacctgctggcctaatctggggcgcggacgttttggtcaacccattaccttaccgggattcagccagccagcaaccgagtttaacccggctcaagtttatctggccgatctggatggcagcggtccaacggatctgatttatgttcatacaaaccgtctggatatcttcctgaacaaaagtggcaatggctttgctgaaccagtgacattacgcttcccggaaggtctgcgttttgatcatacctgtcagttacaaatggccgatgtacaaggattaggcgtcgccagcctgatactgagcgtgccgcatatgtctccccatcactggcgctgcgatctgaccaacatgaagccgtggttactcaatgaaatgaacaacaatatgggggtccatcacaccttgcgttaccgcagttcctcccaattctggctggatgaaaaagccgcggcgctgactaccggacaaacaccggtttgctatctccccttcccgatccacaccctatggcaaacggaaacagaagatgaaatcagcggcaacaaattagtcacaacacttcgttatgctcgtggcgcatgggacggacgcgagcgggaatttcgcggatttggttatgtagagcagacagacagccatcaactggctcaaggcaacgcgccagaacgtacgccaccggcgctgaccaaaaactggtatgccaccggactgccggtgatagataacgcattatcaaccgagtattggcgtgatgatcaggcttttgccggtttctcaccgcgctttacgacttggcaagataacaaagatgtcccgttaacaccggaagatgataacagtcgttactggttcaaccgcgcgttgaaaggtcaactgctacgtagtgaactgtacggattggacgatagtacaaataaacacgttccctatactgtcactgaatttcgttcacaggtacgtcgattacagcataccgacagccgataccctgtactttggtcatctgtagttgaaagccgcaactatcactacgaacgtatcgccagcgacccgcaatgcagtcaaaatattacgctatccagtgatcgatttggtcagccgctaaaacagctttcggtacagtacccgcgccgccagcagccagcaatcaatctgtatcctgatacattgcctgataagttgttagccaacagctatgatgaccaacaacgccaattacggctcacctatcaacaatccagttggcatcacctgaccaacaataccgttcgagtattgggattaccggatagtacccgcagtgatatctttacttatggcgctgaaaatgtgcctgctggtggtttaaatctggaacttctgagtgataaaaatagcctgatcgcggacgataaaccacgtgaatacctcggtcagcaaaaaaccgcttataccgatggacaaaatacaacgccgttgcaaacaccaacacggcaagccctgattgcctttaccgaaacaacggtattcaaccagtccacattatcagcgtttaacggaagcatcccgtccgataaattatcaacgacgctggagcaagctggatatcagcaaacaaattatctattccctcgcactggagaagataaagtttgggtagcccatcacggctataccgattatggtacagcggcacagttctggcgcccgcaaaaacagagcaacacccaactcaccggtaaaatcaccctcatctgggatgcaaactattgcgttgtggtacaaacccgggatgctgctggactgacaacctcagccaaatatgactggcgttttctgaccccggtgcaactcaccgatatcaatgacaatcagcaccttatcacactggatgcattgggccgaccaatcacattgcgcttttggggaactgaaaacggcaagatgacaggttattcctcaccggaaaaagcatcattttctccaccatccgatgttaatgccgctattgagttaaaaaaaccgctccctgtagcacagtgtcaggtctacgcaccagaaagctggatgccagtattaagtcagaaaaccttcaatcgactggcagaacaagattggcaaaagttatataacgcccgaatcatcaccgaagatggacgtatctgcacactggcttatcgccgctgggtacaaagccaaaaggcaatccctcaactcattagcctgttaaacaacggaccccgtttacctcctcacagcctgacattgacgacggatcgttatgatcacgatcctgagcaacagatccgtcaacaggtggtattcagtgatggctttggccgcttgctgcaagccgctgcccgacatgaggcaggcatggcccggcaacgcaatgaagacggctctttgattataaatgtccagcatactgagaaccgttgggcagtgactggacgaacggaatatgacaataaggggcaaccgatacgtacctatcagccctatttcctcaatgactggcgatacgtcagcaatgatagtgcccggcaggaaaaagaagcttatgcagatacccatgtctatgatcccataggtcgagaaatcaaggttatcaccgcaaaaggttggttccgtcgaaccttgttcactccctggtttactgtcaatgaagatgaaaatgacacagccgctgaggtgaagaaggtaaagatgtaattaatctgactcgag

SEQ ID NO: 58 - protein, 2472 aa, Artificial Sequence
  TcdB2/TccC3 fusion protein pDAB8951
MKNIDPKLYQKTPTVSVYDNRGLIIRNIDFHRTTANGDPDTRITRHQYDIHGHLNQSIDPRLYEAKQTNNTIKPNFLWQYDLTGNPLCTESIDAGRTVTLNDIEGRPLLTVTATGVIQTRQYETSSLPGRLLSVAEQTPEEKTSRITERLIWAGNTEAEKDHNLAGQCVRHYDTAGVTRLESLSLTGTVLSQSSQLLIDTQEANWTGDNETVWQNMLADDIYTTLSTFDATGALLTQTDAKGNIQRLAYDVAGQLNGSWLTLKGQTEQVIIKSLTYSAAGQKLREEHGNDVITEYSYEPETQRLIGIKTRRPSDTKVLQDLRYEYDPVGNVISIRNDAEATRFWHNQKVMPENTYTYDSLYQLISATGREMANIGQQSHQFPSPALPSDNNTYTNYTRTYTYDRGGNLTKIQHSSPATQNNYTTNITVSNRSNRAVLSTLTEDPAQVDALFDAGGHQNTLISGQNLNWNTRGELQQVTLVKRDKGANDDREWYRYSGDGRRMLKINEQQASNNAQTQRVTYLPNLELRLTQNSTATTEDLQVITVGEAGRAQVRVLHWESGKPEDIDNNQLRYSYDNLIGSSQLELDSEGQIISEEEYYPYGGTALWAARNQTEASYKTIRYSGKERDATGLYYYGYRYYQPWIGRWLSSDPAGTIDGLNLYRMVRNNPVTLLDPDGLMPTIAERIAALKKNKVTDSAPSPANATNVAINIRPPVAPKPSLPKASTSSQPTTHPIGAANIKPTTSGSSIVAPLSPVGNKSTSEISLPESAQSSSSSTTSTNLQKKSFTLYRADNRSFEEMQSKFPEGFKAWTPLDTKMARQFASIFIGQKDTSNLPKETVKNISTWGAKPKLKDLSNYIKYTKDKSTVWVSTAINTEAGGQSSGAPLHKIDMDLYEFAIDGQKLNPLPEGRTKNMVPSLLLDTPQIETSSIIALNHGPVNDAEISFLTTIPLKNVKPHKRPRLDRAADITTQNAHDSAIVALRQNIPTPAPLSLRSRPMQNSQDFSITELSLPKGGGAITGMGEALTPTGPDGMAALSLPLPISAGRGYAPAFTLNYNSGAGNSPFGLGWDCNVMTIRRRTHFGVPHYDETDTFLGPEGEVLVVADQPRDESTLQGINLGATFTVTGYRSRLESHFSRLEYWQPKTTGKTDFWLIYSPDGQVHLLGKSPQARISNPSQTTQTAQWLLEASVSSRGEQIYYQYRAEDDTGCEADEITHHLQATAQRYLHIVYYGNRTASETLPGLDGSAPSQADWLFYLVFDYGERSNNLKTPPAFSTTGSWLCRQDRFSRYEYGFEIRTRRLCRQVLMYHHLQALDSKITEHNGPTLVSRLILNYDESAIASTLVFVRRVGHEQDGNVVTLPPLELAYQDFSPRHHAHWQPMDVLANFNAIQRWQLVDLKGEGLPGLLYQDKGAWWYRSAQRLGEIGSDAVTWEKMQPLSVIPSLQSNASLVDINGDGQLDWVITGPGLRGYHSQRPDGSWTRFTPLNALPVEYTHPRAQLADLMGAGLSDLVLIGPKSVRLYANTRDGFAKGKDVVQSGDITLPVPGADPRKLVAFSDVLGSGQAHLVEVSATKVTCWPNLGRGRFGQPITLPGFSQPATEFNPAQVYLADLDGSGPTDLIYVHTNRLDIFLNKSGNGFAEPVTLRFPEGLRFDHTCQLQMADVQGLGVASLILSVPHMSPHHWRCDLTNMKPWLLNEMNNNMGVHHTLRYRSSSQFWLDEKAAALTTGQTPVCYLPFPIHTLWQTETEDEISGNKLVTTLRYARGAWDGREREFRGFGYVEQTDSHQLAQGNAPERTPPALTKNWYATGLPVIDNALSTEYWRDDQAFAGFSPRFTTWQDNKDVPLTPEDDNSRYWFNRALKGQLLRSELYGLDDSTNKHVPYTVTEFRSQVRRLQHTDSRYPVLWSSVVESRNYHYERIASDPQCSQNITLSSDRFGQPLKQLSVQYPRRQQPAINLYPDTLPDKLLANSYDDQQRQLRLTYQQSSWHHLTNNTVRVLGLPDSTRSDIFTYGAENVPAGGLNLELLSDKNSLIADDKPREYLGQQKTAYTDGQNTTPLQTPTRQALIAFTETTVFNQSTLSAFNGSIPSDKLSTTLEQAGYQQTNYLFPRTGEDKVWVAHHGYTDYGTAAQFWRPQKQSNTQLTGKITLIWDANYCVVVQTRDAAGLTTSAKYDWRFLTPVQLTDINDNQHLITLDALGRPITLRFWGTENGKMTGYSSPEKASFSPPSDVNAAIELKKPLPVAQCQVYAPESWMPVLSQKTFNRLAEQDWQKLYNARIITEDGRICTLAYRRWVQSQKAIPQLISLLNNGPRLPPHSLTLTTDRYDHDPEQQIRQQVVFSDGFGRLLQAAARHEAGMARQRNEDGSLIINVQHTENRWAVTGRTEYDNKGQPIRTYQPYFLNDWRYVSNDSARQEKEAYADTHVYDPIGREIKVITAKGWFRRTLFTPWFTVNEDENDTAAEVKKVKM

SEQ ID NO: 59 - DNA, 15036 bp, Artificial Sequence
  Nucleic acid sequence encoding TcdB2/TccC3 fusion protein pDAB8811
tctagacgtgcgtcgacaagaaggagatataccatgtatagcacggctgtattactcaataaaatcagtcccactcgcgacggtcagacgatgactcttgcggatctgcaatatttatccttcagtgaactgagaaaaatctttgatgaccagctcagttggggagaggctcgccatctctatcatgaaactatagagcagaaaaaaaataatcgcttgctggaagcgcgtatttttacccgtgccaacccacaattatccggtgctatccgactcggtattgaacgagacagcgtttcacgcagttatgatgaaatgtttggtgcccgttcttcttcctttgtgaaaccgggttcagtggcttccatgttttcaccggctggctatctcaccgaattgtatcgtgaagcgaaggacttacatttttcaagctctgcttatcatcttgataatcgccgtccggatctggctgatctgactctgagccagagtaatatggatacagaaatttccaccctgacactgtctaacgaactgttgctggagcatattacccgcaagaccggaggtgattcggacgcattgatggagagcctgtcaacttaccgtcaggccattgataccccttaccatcagccttacgagactatccgtcaggtcattatgacccatgacagtacactgtcagcgctgtcccgtaatcctgaggtgatggggcaggcggaaggggcttcattactggcgattctggccaatatttctccggagctttataacattttgaccgaagagattacggaaaagaacgctgatgctttatttgcgcaaaacttcagtgaaaatatcacgcccgaaaatttcgcgtcacaatcatggatagccaagtattatggtcttgaactttctgaggtgcaaaaatacctcgggatgttgcagaatggctattctgacagcacctctgcttatgtggataatatctcaacgggtttagtggtcaataatgaaagtaaactcgaagcttacaaaataacacgtgtaaaaacagatgattatgataaaaatataaattactttgatttgatgtatgaaggaaataatcagttctttatacgtgctaattttaaggtatcaagagaatttggggctactcttagaaaaaacgcagggccaagtggcattgtcggcagcctttccggtcctctaatagccaatacgaattttaaaagtaattatctaagtaacatatctgattctgaatacaaaaacggtgtaaagatatacgcctatcgctatacgtcttccaccagcgccacaaatcagggcggcggaatattcacttttgagtcttatcccctgactatatttgcgctcaaactgaataaagccattcgcttgtgcctgactagcgggctttcaccgaatgaactgcaaactatcgtacgcagtgacaatgcacaaggcatcatcaacgactccgttctgaccaaagttttctatactctgttctacagtcaccgttatgcactgagctttgatgatgcacaggtactgaacggatcggtcattaatcaatatgccgacgatgacagtgtcagtcattttaaccgtctctttaatacaccgccgctgaaagggaaaatctttgaagccgacggcaacacggtcagcattgatccggatgaagagcaatctacctttgcccgttcagccctgatgcgtggtctgggggtcaacagtggtgaactgtatcagttaggcaaactggcgggtgtgctggacgcccaaaataccatcacactttctgtcttcgttatctcttcactgtatcgcctcacgttactggcccgtgtccatcagctgacggtcaatgaactgtgtatgctttatggtctttcgccgttcaatggcaaaacaacggcttctttgtcttccggggagttgccacggctggttatctggctgtatcaggtgacgcagtggctgactgaggcggaaatcaccactgaagcgatctggttattatgtacgccagagtttagcgggaatatttcaccggaaatcagtaatctgctcaataacctccgaccgagtattagtgaagatatggcacagagtcacaatcgggagctgcaggctgaaattctcgcgccgtttattgctgcaacgctgcatctggcgtcaccggatatggcacggtatatcctgttgtggaccgataacctgcggccgggtggcttagatattgccgggtttatgacactggtattgaaagagtcgttaaatgccaatgaaaccacccaattggtacaattctgccatgtgatggcacagttatcgctttccgtacagacactgcgcctcagtgaagcggagctatccgtgctggtcatctccggattcgccgtgctgggggcaaaaaatcaacctgccggacagcacaatattgatacgctattctcactctaccgattccaccagtggattaatgggctgggcaatcccggctctgacacgctggatatgctgcgccagcagacactcacggccgacagactggcctccgtgatggggctggacatcagtatggtaacgcaggccatggtttccgccggcgtgaaccagcttcagtgttggcaggatatcaacaccgtgttgcagtggatagatgtggcatcagcactgcacacgatgccgtcggttatccgtacgctggtgaatatccgttacgtgactgcattaaacaaagccgagtcgaatctgccttcctgggatgagtggcagacactggcagaaaatatggaagccggactcagtacacaacaggctcagacgctggcggattataccgcggagcgcttgagtagcgtgctgtgcaattggtttctggcgaatatccagccagaaggggtgtccctgcacagccgggatgacctgtacagctatttcctgattgataatcaggtctcttctgccataaaaaccacccgactggcagaggccattgccggtattcagctctacatcaaccgggcgctgaatcggatagagcctaatgcccgtgccgatgtgtcaacccgccagttttttaccgactggacggtgaataaccgttacagcacctggggcggggtgtcgcggctggtttattatccggaaaattacattgacccaacccagcgtatcgggcagacccggatgatggatgaactgctggaaaatatcagccagagtaaacttagccgggacacagtggaggatgcctttaaaacttacctgacccgctttgaaaccgtggcggatctgaaagttgtcagcgcctatcacgacaacgtcaacagcaacaccggactgacctggtttgtcggccaaacgcgggagaacctgccggaatactactggtgtaacgtggatatatcacggatgcaggcgggtgaactggccgccaatgcctggaaagagtggacgaagattgatacagcggtcaacccctacaaggatgcaatacgtccggtcatactcagggaacgtttgcaccttatctgggtagaaaaagaggaagtggcgaaaaatggtactgatccggtggaaacctgtgaccgttttactctgaaactggcgtttctgcgtcatgatggcagttggagtgccccctggtcttacgatatcacaacgcaggtggaggcggtcactgacaaaaaacctgacactgaacggctggcgctggccgcatcaggctttcagggcgaggacactctgctggtgtttgtctacaaaaccgggaagagttactcggattttggcggcagcaataaaaatgtggcaggcatgaccatttacggcgatggctccttcaaaaagatggagaacacagcactcagccgttacagccaactgaaaaatacctttgatatcattcatactcaaggcaacgacttggtaagaaaggccagctatcgtttcgcgcaggattttgaagtgcctgcctcgttgaatatgggttctgccatcggtgatgatagtctgacggtgatggagaacgggaatattccgcagataaccagtaaatactccagcgataaccttgctattacgctacataacgccgctttcactgtcagatatgatggcagtggcaatgtcatcagaaacaaacaaatcagcgccatgaaactgacgggggtggatggaaagtcccagtacggcaatgcatttatcatcgcaaataccgttaaacattatggcggttactctgatctgggggggccgatcaccgtttataataaaacgaaaaactatattgcatcagttcaaggccacttgatgaacgcagattacactaggcgtttgattctaacaccagttgaaaataattattatgccagattgttcgagtttccattttctccaaacacaattttaaacaccgttttcacggttggtagcaataaaaccagtgattttaaaaagtgcagttatgctgttgatggtaataattctcagggcttccagatatttagttcctatcaatcatccggctggctggatattgatacaggcattaacaataccgatatcaaaattacggtgatggctggcagtaaaacccacacctttacggccagtgaccatattgcttccttgccggcaaacagttttgatgctatgccgtacacctttaagccactggaaatcgatgcttcatcgttggcctttaccaataatattgctcctctggatatcgtttttgagaccaaagccaaagacgggcgagtgctgggtaagatcaagcaaacattatcggtgaaacgggtaaattataatccggaagatattctgtttctgcgtgaaactcattcgggtgcccaatatatgcagctcggggtgtatcgtattcgtcttaataccctgctggcttctcaactggtatccagagcaaacacgggcattgatactatcctgacaatggaaacccagcggttaccggaacctccgttgggagaaggcttctttgccaactttgttctgcctaaatatgaccctgctgaacatggcgatgagcggtggtttaaaatccatattgggaatgttggcggtaacacgggaaggcagccttattacagcggaatgttatccgatacgtcggaaaccagtatgacactgtttgtcccttatgccgaagggtattacatgcatgaaggtgtcagattgggggttggataccagaaaattacctatgacaacacttgggaatctgctttcttttattttgatgagacaaaacagcaatttgtattaattaacgatgctgatcatgattcaggaatgacgcaacaggggatcgtgaaaaatatcaagaaatacaaaggatttttgaatgtttctatcgcaacgggctattccgccccgatggatttcaatagtgccagcgccctctattactgggaattgttctattacaccccgatgatgtgcttccagcgtttgctacaggaaaaacaattcgacgaagccacacaatggataaactacgtctacaatcccgccggctatatcgttaacggagaaatcgccccctggatctggaactgccggccgctggaagagaccacctcctggaatgccaatccgctggatgccatcgatccggatgccgtcgcccaaaatgacccaatgcactacaagattgccacctttatgcgcctgttggatcaacttattctgcgcggcgatatggcctatcgagaactgacccgcgatgcgttgaatgaagccaaaatgtggtatgtgcgtactttagaattgctcggtgatgagccggaggattacggtagccaacagtgggcagcaccgtccctttccggggcggcgagtcaaaccgtgcaggcggcttatcagcaggatcttacgatgctgggccgtggtggggtttccaagaatctccgtaccgctaactcgttggtgggtttgttcctgccggaatataacccggcgctcaccgattactggcaaaccctgcgtttgcgcctgtttaacctgcgccataatctttccattgacggacagccgttatcgctggcgatttacgccgagcctaccgatccgaaagcgctgctcaccagtatggtacaggcctctcagggcggtagtgcagtgctgcccggcacattgtcgttataccgcttcccggtgatgctggagcggacccgcaatctggtagcgcaattaacccagttcggcacctctctgctcagtatggcagagcatgatgatgccgatgaactcaccacgctgctactacagcagggtatggaactggcgacacagagcatccgtattcagcaacgaactgtcgatgaagtggatgctgatattgctgtattggcagagagccgccgcagtgcacaaaatcgtctggaaaaataccagcagctgtatgacgaggatatcaaccacggagaacagcgggcaatgtcactgcttgatgcagcggcaggtcagtctctggccgggcaggtgctttcaatagcggaaggggtggccgatttagtgccaaacgtgttcggtttagcttgtggcggcagtcgttggggggcagcactgcgtgcttccgcctccgtgatgtcgctttctgccacagcttcccaatattccgcagacaaaatcagccgttcggaagcctaccgccgccgccgtcaggagtgggaaattcagcgtgataatgctgacggtgaagtcaaacaaatggatgcccagttggaaagcctgaaaatccgccgcgaagcagcacagatgcaggtggaatatcaggagacccagcaggcccatactcaggctcagttagagctgttacagcgtaaattcacaaacaaagcgctttacagttggatgcgcggcaagctgagtgctatctattaccagttctttgacctgacccagtccttctgcctgatggcacaggaagcgctgcgccgcgagctgaccgacaacggtgttacctttatccggggtggggcctggaacggtacgactgcgggtttgatggcgggtgaaacgttgctgctgaatctggcagaaatggaaaaagtctggctggagcgtgatgagcgggcactggaagtgacccgtaccgtctcgttggcacagttctatcaggccttatcatcagacaactttaatctgaccgaaaaactcacgcaattcctgcgtgaagggaaaggcaacgtaggagcttccggcaatgaattaaaactcagtaaccgtcagatagaagcctcagtgcgattgtctgatttgaaaattttcagcgactaccccgaaagccttggcaatacccgtcagttgaaacaggtgagtgtcaccttgccggcgctggttgggccgtatgaagatattcgggcggtgctgaattacgggggcagcatcgtcatgccacgcggttgcagtgctattgctctctcccacggcgtgaatgacagtggtcaatttatgctggatttcaacgattcccgttatctgccgtttgaaggtatttccgtgaatgacagcggcagcctgacgttgagtttcccggatgcgactgatcggcagaaagcgctgctggagagcctgagcgatatcattctgcatatccgctataccattcgttctcctagggatcgtacccgtccaactagtatgcaaaattcacaagattttagtattacggaactgtcactgcccaaaggggggggcgctatcacgggaatgggtgaagcattaacccccactggaccggatggtatggccgcgctatctctaccattgcctatttctgccgggcgcggttatgctcccgcattcactctgaattacaacagcggcgccggtaacagtccatttggtctgggttgggattgcaacgttatgactatccgccgccgcacccattttggcgtcccccattatgacgaaaccgatacctttttggggccagaaggcgaagtgctggtggtagcggatcaacctcgcgacgaatccacattacagggtatcaatttaggcgccacctttaccgttaccggctaccgttcccgtctggaaagccatttcagccgattggaatattggcaacccaaaacaacaggtaaaacagatttttggttgatatatagcccagatgggcaggtgcatctactgggtaaatcaccgcaagcgcggatcagcaacccatcccaaacgacacaaacagcacaatggctgctggaagcctctgtatcatcacgtggcgaacaaatttattatcaatatcgcgccgaagatgacacaggttgcgaagcagatgaaattacgcaccatttacaggctacagcgcaacgttatttacacatcgtgtattacggcaaccgtacagccagcgaaacattacccggtctggatggcagcgccccatcacaagcagactggttgttctatctggtatttgattacggcgaacgcagtaacaacctgaaaacgccaccagcattttcgactacaggtagctggctttgccgtcaggaccgtttttcccgttatgaatatggctttgagattcgtacccgccgcttatgccgtcaggtattgatgtaccatcacctgcaagcactggatagtaagataacagaacacaacggaccaacgctggtttcacgcctgatactcaattacgacgaaagcgcgatagccagcacgctagtattcgttcgccgagtgggacacgagcaagatggtaatgtcgtcaccctgccgccattagaattggcatatcaggatttttcaccgcgacatcacgctcactggcaaccaatggatgtactggcaaacttcaatgccattcagcgctggcagctagtcgatctaaaaggcgaaggattacccggcctgttatatcaggataaaggcgcttggtggtaccgctccgcacagcgtctgggcgaaattggctcagatgccgtcacttgggaaaagatgcaacctttatcggttattccttctttgcaaagtaatgcctcgttggtggatatcaatggagacggccaacttgactgggttatcaccggaccgggattacggggatatcatagtcaacgcccggatggcagttggacacgttttaccccactcaacgctctgccggtggaatacacccatccacgcgcgcaactcgcagatttaatgggagccgggctatccgatttggtgctgatcggccctaagagcgtgcgtttatatgccaatacccgcgacggctttgccaaaggaaaagatgtggtgcaatccggtgatatcacactgccggtgccgggcgccgatccacgtaagttggtggcgtttagtgatgtattgggttcaggtcaagcccatctggttgaagtaagcgcgactaaagtcacctgctggcctaatctggggcgcggacgttttggtcaacccattaccttaccgggattcagccagccagcaaccgagtttaacccggctcaagtttatctggccgatctggatggcagcggtccaacggatctgatttatgttcatacaaaccgtctggatatcttcctgaacaaaagtggcaatggctttgctgaaccagtgacattacgcttcccggaaggtctgcgttttgatcatacctgtcagttacaaatggccgatgtacaaggattaggcgtcgccagcctgatactgagcgtgccgcatatgtctccccatcactggcgctgcgatctgaccaacatgaagccgtggttactcaatgaaatgaacaacaatatgggggtccatcacaccttgcgttaccgcagttcctcccaattctggctggatgaaaaagccgcggcgctgactaccggacaaacaccggtttgctatctccccttcccgatccacaccctatggcaaacggaaacagaagatgaaatcagcggcaacaaattagtcacaacacttcgttatgctcgtggcgcatgggacggacgcgagcgggaatttcgcggatttggttatgtagagcagacagacagccatcaactggctcaaggcaacgcgccagaacgtacgccaccggcgctgaccaaaaactggtatgccaccggactgccggtgatagataacgcattatcaaccgagtattggcgtgatgatcaggcttttgccggtttctcaccgcgctttacgacttggcaagataacaaagatgtcccgttaacaccggaagatgataacagtcgttactggttcaaccgcgcgttgaaaggtcaactgctacgtagtgaactgtacggattggacgatagtacaaataaacacgttccctatactgtcactgaatttcgttcacaggtacgtcgattacagcataccgacagccgataccctgtactttggtcatctgtagttgaaagccgcaactatcactacgaacgtatcgccagcgacccgcaatgcagtcaaaatattacgctatccagtgatcgatttggtcagccgctaaaacagctttcggtacagtacccgcgccgccagcagccagcaatcaatctgtatcctgatacattgcctgataagttgttagccaacagctatgatgaccaacaacgccaattacggctcacctatcaacaatccagttggcatcacctgaccaacaataccgttcgagtattgggattaccggatagtacccgcagtgatatctttacttatggcgctgaaaatgtgcctgctggtggtttaaatctggaacttctgagtgataaaaatagcctgatcgcggacgataaaccacgtgaatacctcggtcagcaaaaaaccgcttataccgatggacaaaatacaacgccgttgcaaacaccaacacggcaagccctgattgcctttaccgaaacaacggtattcaaccagtccacattatcagcgtttaacggaagcatcccgtccgataaattatcaacgacgctggagcaagctggatatcagcaaacaaattatctattccctcgcactggagaagataaagtttgggtagcccatcacggctataccgattatggtacagcggcacagttctggcgcccgcaaaaacagagcaacacccaactcaccggtaaaatcaccctcatctgggatgcaaactattgcgttgtggtacaaacccgggatgctgctggactgacaacctcagccaaatatgactggcgttttctgaccccggtgcaactcaccgatatcaatgacaatcagcaccttatcacactggatgcattgggccgaccaatcacattgcgcttttggggaactgaaaacggcaagatgacaggttattcctcaccggaaaaagcatcattttctccaccatccgatgttaatgccgctattgagttaaaaaaaccgctccctgtagcacagtgtcaggtctacgcaccagaaagctggatgccagtattaagtcagaaaaccttcaatcgactggcagaacaagattggcaaaagttatataacgcccgaatcatcaccgaagatggacgtatctgcacactggcttatcgccgctgggtacaaagccaaaaggcaatccctcaactcattagcctgttaaacaacggaccccgtttacctcctcacagcctgacattgacgacggatcgttatgatcacgatcctgagcaacagatccgtcaacaggtggtattcagtgatggctttggccgcttgctgcaagccgctgcccgacatgaggcaggcatggcccggcaacgcaatgaagacggctctttgattataaatgtccagcatactgagaaccgttgggcagtgactggacgaacggaatatgacaataaggggcaaccgatacgtacctatcagccctatttcctcaatgactggcgatacgtcagcaatgatagtgcccggcaggaaaaagaagcttatgcagatacccatgtctatgatcccataggtcgagaaatcaaggttatcaccgcaaaaggttggttccgtcgaaccttgttcactccctggtttactgtcaatgaagatgaaaatgacacagccgctgaggtgaagaaggtaaagatgccgggatccgacaacaagggtcagactatccgcactaggcctatgaaaaacatcgatcccaaactttatcaaaaaacccctactgtcagcgtttacgataaccgtggtctgataatccgtaacatcgattttcatcgtactaccgcaaatggtgatcccgatacccgtattacccgccatcaatacgatattcacggacacctaaatcaaagcatcgatccgcgcctatatgaagccaagcaaaccaacaatacgatcaaacccaattttctttggcagtatgatttgaccggtaatcccctatgtacagagagcattgatgcaggtcgcactgtcaccttgaatgatattgaaggccgtccgctactaacggtgactgcaacaggggttatacaaactcgacaatatgaaacttcttccctgcccggtcgtctgttatctgttgccgaacaaacacccgaggaaaaaacatcccgtatcaccgaacgcctgatttgggctggcaataccgaagcagagaaagaccataaccttgccggccagtgcgtgcgtcactatgacacggcgggagttacccggttagagagtttatcactgaccggtactgttttatctcaatccagccaactattgatcgacactcaagaggcaaactggacaggtgataacgaaaccgtctggcaaaacatgctggctgatgacatctacacaaccctgagcaccttcgatgccaccggtgctttactgactcagaccgatgcgaaagggaacattcagagactggcttatgatgtggccgggcagctaaacgggagctggctaacactcaaaggccagacggaacaagtgattatcaaatccctgacctactccgccgccggacaaaaattacgtgaggaacacggcaatgatgttatcaccgaatacagttatgaaccggaaacccaacggctgatcggtatcaaaacccgccgtccgtcagacactaaagtgctacaagacctgcgctatgaatatgacccggtaggcaatgtcatcagcatccgtaatgacgcggaagccacccgcttttggcacaatcagaaagtgatgccggaaaacacttatacctacgattccctgtatcagcttatcagcgccaccgggcgcgaaatggcgaatataggtcaacaaagtcaccaatttccctcacccgctctaccttctgataacaacacctataccaactatacccgtacttatacttatgaccgtggcggcaatctgaccaaaatccagcacagttcaccggcgacgcaaaacaactacaccaccaatatcacggtttcaaatcgcagcaaccgcgcagtactcagcacattgaccgaagatccggcgcaagtagatgctttgtttgatgcaggcggacatcagaacaccttgatatcaggacaaaacctgaactggaatactcgtggtgaactgcaacaagtaacactggttaaacgggacaagggcgccaatgatgatcgggaatggtatcgttatagcggtgacggaagaaggatgttaaaaatcaatgaacagcaggccagcaacaacgctcaaacacaacgtgtgacttatttgccgaacttagaacttcgtctaacacaaaacagcacggccacaaccgaagatttgcaagttatcaccgtaggcgaagcgggccgggcacaggtacgagtattacattgggagagcggtaaaccggaagatatcgacaataatcagttgcgttatagttacgataatcttatcggttccagtcaacttgaattagatagcgaaggacaaattatcagtgaagaagaatattatccctatggtggaacagcattatgggccgccaggaatcagacagaagccagttataaaactatccgttattcaggcaaagagcgggatgccaccgggctatattactacggctatcggtattaccaaccgtggataggacggtggttaagctccgatccggcaggaacaatcgatgggctgaatttatatcggatggtgaggaataatccagttaccctccttgatcctgatggattaatgccaacaattgcagaacgcatagcagcactaaaaaaaaataaagtaacagactcagcgccttcgccagcaaatgccacaaacgtagcgataaacatccgcccgcctgtagcaccaaaacctagcttaccgaaagcatcaacgagtagccaaccaaccacacaccctatcggagctgcaaacataaaaccaacgacgtctgggtcatctattgttgctccattgagtccagtaggaaataaatctacttctgaaatctctctgccagaaagcgctcaaagcagttcttcaagcactacctcgacaaatctacagaaaaaatcatttactttatatagagcagataacagatcctttgaagaaatgcaaagtaaattccctgaaggatttaaagcctggactcctctagacactaagatggcaaggcaatttgctagtatctttattggtcagaaagatacatctaatttacctaaagaaacagtcaagaacataagcacatggggagcaaagccaaaactaaaagatctctcaaattacataaaatataccaaggacaaatctacagtatgggtttctactgcaattaatactgaagcaggtggacaaagctcaggggctccactccataaaattgatatggatctctacgagtttgccattgatggacaaaaactaaatccactaccggagggtagaactaaaaacatggtaccttcccttttactcgacaccccacaaatagagacatcatccatcattgcacttaatcatggaccggtaaatgatgcagaaatttcatttctgacaacaattccgcttaaaaatgtaaaacctcataagagataattaatctgactcgag

SEQ ID NO: 60 - protein, 4995 aa, Artificial Sequence
  TcdB2/TccC3 fusion protein pDAB8811
MYSTAVLLNKISPTRDGQTMTLADLQYLSFSELRKIFDDQLSWGEARHLYHETIEQKKNNRLLEARIFTRANPQLSGAIRLGIERDSVSRSYDEMFGARSSSFVKPGSVASMFSPAGYLTELYREAKDLHFSSSAYHLDNRRPDLADLTLSQSNMDTEISTLTLSNELLLEHITRKTGGDSDALMESLSTYRQAIDTPYHQPYETIRQVIMTHDSTLSALSRNPEVMGQAEGASLLAILANISPELYNILTEEITEKNADALFAQNFSENITPENFASQSWIAKYYGLELSEVQKYLGMLQNGYSDSTSAYVDNISTGLVVNNESKLEAYKITRVKTDDYDKNINYFDLMYEGNNQFFIRANFKVSREFGATLRKNAGPSGIVGSLSGPLIANTNFKSNYLSNISDSEYKNGVKIYAYRYTSSTSATNQGGGIFTFESYPLTIFALKLNKAIRLCLTSGLSPNELQTIVRSDNAQGIINDSVLTKVFYTLFYSHRYALSFDDAQVLNGSVINQYADDDSVSHFNRLFNTPPLKGKIFEADGNTVSIDPDEEQSTFARSALMRGLGVNSGELYQLGKLAGVLDAQNTITLSVFVISSLYRLTLLARVHQLTVNELCMLYGLSPFNGKTTASLSSGELPRLVIWLYQVTQWLTEAEITTEAIWLLCTPEFSGNISPEISNLLNNLRPSISEDMAQSHNRELQAEILAPFIAATLHLASPDMARYILLWTDNLRPGGLDIAGFMTLVLKESLNANETTQLVQFCHVMAQLSLSVQTLRLSEAELSVLVISGFAVLGAKNQPAGQHNIDTLFSLYRFHQWINGLGNPGSDTLDMLRQQTLTADRLASVMGLDISMVTQAMVSAGVNQLQCWQDINTVLQWIDVASALHTMPSVIRTLVNIRYVTALNKAESNLPSWDEWQTLAENMEAGLSTQQAQTLADYTAERLSSVLCNWFLANIQPEGVSLHSRDDLYSYFLIDNQVSSAIKTTRLAEAIAGIQLYINRALNRIEPNARADVSTRQFFTDWTVNNRYSTWGGVSRLVYYPENYIDPTQRIGQTRMMDELLENISQSKLSRDTVEDAFKTYLTRFETVADLKVVSAYHDNVNSNTGLTWFVGQTRENLPEYYWCNVDISRMQAGELAANAWKEWTKIDTAVNPYKDAIRPVILRERLHLIWVEKEEVAKNGTDPVETCDRFTLKLAFLRHDGSWSAPWSYDITTQVEAVTDKKPDTERLALAASGFQGEDTLLVFVYKTGKSYSDFGGSNKNVAGMTIYGDGSFKKMENTALSRYSQLKNTFDIIHTQGNDLVRKASYRFAQDFEVPASLNMGSAIGDDSLTVMENGNIPQITSKYSSDNLAITLHNAAFTVRYDGSGNVIRNKQISAMKLTGVDGKSQYGNAFIIANTVKHYGGYSDLGGPITVYNKTKNYIASVQGHLMNADYTRRLILTPVENNYYARLFEFPFSPNTILNTVFTVGSNKTSDFKKCSYAVDGNNSQGFQIFSSYQSSGWLDIDTGINNTDIKITVMAGSKTHTFTASDHIASLPANSFDAMPYTFKPLEIDASSLAFTNNIAPLDIVFETKAKDGRVLGKIKQTLSVKRVNYNPEDILFLRETHSGAQYMQLGVYRIRLNTLLASQLVSRANTGIDTILTMETQRLPEPPLGEGFFANFVLPKYDPAEHGDERWFKIHIGNVGGNTGRQPYYSGMLSDTSETSMTLFVPYAEGYYMHEGVRLGVGYQKITYDNTWESAFFYFDETKQQFVLINDADHDSGMTQQGIVKNIKKYKGFLNVSIATGYSAPMDFNSASALYYWELFYYTPMMCFQRLLQEKQFDEATQWINYVYNPAGYIVNGEIAPWIWNCRPLEETTSWNANPLDAIDPDAVAQNDPMHYKIATFMRLLDQLILRGDMAYRELTRDALNEAKMWYVRTLELLGDEPEDYGSQQWAAPSLSGAASQTVQAAYQQDLTMLGRGGVSKNLRTANSLVGLFLPEYNPALTDYWQTLRLRLFNLRHNLSIDGQPLSLAIYAEPTDPKALLTSMVQASQGGSAVLPGTLSLYRFPVMLERTRNLVAQLTQFGTSLLSMAEHDDADELTTLLLQQGMELATQSIRIQQRTVDEVDADIAVLAESRRSAQNRLEKYQQLYDEDINHGEQRAMSLLDAAAGQSLAGQVLSIAEGVADLVPNVFGLACGGSRWGAALRASASVMSLSATASQYSADKISRSEAYRRRRQEWEIQRDNADGEVKQMDAQLESLKIRREAAQMQVEYQETQQAHTQAQLELLQRKFTNKALYSWMRGKLSAIYYQFFDLTQSFCLMAQEALRRELTDNGVTFIRGGAWNGTTAGLMAGETLLLNLAEMEKVWLERDERALEVTRTVSLAQFYQALSSDNFNLTEKLTQFLREGKGNVGASGNELKLSNRQIEASVRLSDLKIFSDYPESLGNTRQLKQVSVTLPALVGPYEDIRAVLNYGGSIVMPRGCSAIALSHGVNDSGQFMLDFNDSRYLPFEGISVNDSGSLTLSFPDATDRQKALLESLSDIILHIRYTIRSPRDRTRPTSMQNSQDFSITELSLPKGGGAITGMGEALTPTGPDGMAALSLPLPISAGRGYAPAFTLNYNSGAGNSPFGLGWDCNVMTIRRRTHFGVPHYDETDTFLGPEGEVLVVADQPRDESTLQGINLGATFTVTGYRSRLESHFSRLEYWQPKTTGKTDFWLIYSPDGQVHLLGKSPQARISNPSQTTQTAQWLLEASVSSRGEQIYYQYRAEDDTGCEADEITHHLQATAQRYLHIVYYGNRTASETLPGLDGSAPSQADWLFYLVFDYGERSNNLKTPPAFSTTGSWLCRQDRFSRYEYGFEIRTRRLCRQVLMYHHLQALDSKITEHNGPTLVSRLILNYDESAIASTLVFVRRVGHEQDGNVVTLPPLELAYQDFSPRHHAHWQPMDVLANFNAIQRWQLVDLKGEGLPGLLYQDKGAWWYRSAQRLGEIGSDAVTWEKMQPLSVIPSLQSNASLVDINGDGQLDWVITGPGLRGYHSQRPDGSWTRFTPLNALPVEYTHPRAQLADLMGAGLSDLVLIGPKSVRLYANTRDGFAKGKDVVQSGDITLPVPGADPRKLVAFSDVLGSGQAHLVEVSATKVTCWPNLGRGRFGQPITLPGFSQPATEFNPAQVYLADLDGSGPTDLIYVHTNRLDIFLNKSGNGFAEPVTLRFPEGLRFDHTCQLQMADVQGLGVASLILSVPHMSPHHWRCDLTNMKPWLLNEMNNNMGVHHTLRYRSSSQFWLDEKAAALTTGQTPVCYLPFPIHTLWQTETEDEISGNKLVTTLRYARGAWDGREREFRGFGYVEQTDSHQLAQGNAPERTPPALTKNWYATGLPVIDNALSTEYWRDDQAFAGFSPRFTTWQDNKDVPLTPEDDNSRYWFNRALKGQLLRSELYGLDDSTNKHVPYTVTEFRSQVRRLQHTDSRYPVLWSSVVESRNYHYERIASDPQCSQNITLSSDRFGQPLKQLSVQYPRRQQPAINLYPDTLPDKLLANSYDDQQRQLRLTYQQSSWHHLTNNTVRVLGLPDSTRSDIFTYGAENVPAGGLNLELLSDKNSLIADDKPREYLGQQKTAYTDGQNTTPLQTPTRQALIAFTETTVFNQSTLSAFNGSIPSDKLSTTLEQAGYQQTNYLFPRTGEDKVWVAHHGYTDYGTAAQFWRPQKQSNTQLTGKITLIWDANYCVVVQTRDAAGLTTSAKYDWRFLTPVQLTDINDNQHLITLDALGRPITLRFWGTENGKMTGYSSPEKASFSPPSDVNAAIELKKPLPVAQCQVYAPESWMPVLSQKTFNRLAEQDWQKLYNARIITEDGRICTLAYRRWVQSQKAIPQLISLLNNGPRLPPHSLTLTTDRYDHDPEQQIRQQVVFSDGFGRLLQAAARHEAGMARQRNEDGSLIINVQHTENRWAVTGRTEYDNKGQPIRTYQPYFLNDWRYVSNDSARQEKEAYADTHVYDPIGREIKVITAKGWFRRTLFTPWFTVNEDENDTAAEVKKVKMPGSDNKGQTIRTRPMKNIDPKLYQKTPTVSVYDNRGLIIRNIDFHRTTANGDPDTRITRHQYDIHGHLNQSIDPRLYEAKQTNNTIKPNFLWQYDLTGNPLCTESIDAGRTVTLNDIEGRPLLTVTATGVIQTRQYETSSLPGRLLSVAEQTPEEKTSRITERLIWAGNTEAEKDHNLAGQCVRHYDTAGVTRLESLSLTGTVLSQSSQLLIDTQEANWTGDNETVWQNMLADDIYTTLSTFDATGALLTQTDAKGNIQRLAYDVAGQLNGSWLTLKGQTEQVIIKSLTYSAAGQKLREEHGNDVITEYSYEPETQRLIGIKTRRPSDTKVLQDLRYEYDPVGNVISIRNDAEATRFWHNQKVMPENTYTYDSLYQLISATGREMANIGQQSHQFPSPALPSDNNTYTNYTRTYTYDRGGNLTKIQHSSPATQNNYTTNITVSNRSNRAVLSTLTEDPAQVDALFDAGGHQNTLISGQNLNWNTRGELQQVTLVKRDKGANDDREWYRYSGDGRRMLKINEQQASNNAQTQRVTYLPNLELRLTQNSTATTEDLQVITVGEAGRAQVRVLHWESGKPEDIDNNQLRYSYDNLIGSSQLELDSEGQIISEEEYYPYGGTALWAARNQTEASYKTIRYSGKERDATGLYYYGYRYYQPWIGRWLSSDPAGTIDGLNLYRMVRNNPVTLLDPDGLMPTIAERIAALKKNKVTDSAPSPANATNVAINIRPPVAPKPSLPKASTSSQPTTHPIGAANIKPTTSGSSIVAPLSPVGNKSTSEISLPESAQSSSSSTTSTNLQKKSFTLYRADNRSFEEMQSKFPEGFKAWTPLDTKMARQFASIFIGQKDTSNLPKETVKNISTWGAKPKLKDLSNYIKYTKDKSTVWVSTAINTEAGGQSSGAPLHKIDMDLYEFAIDGQKLNPLPEGRTKNMVPSLLLDTPQIETSSIIALNHGPVNDAEISFLTTIPLKNVKPHKR

SEQ ID NO: 61 - DNA, 7569 bp, Xenorhabdus nematophilus
atgataaaagttaatgaactgttagataagataaatagaaaaaggtctggtgatactttattattgacaaacatttcgtttatgtctttcagcgaatttcgtcataggacaagtggaactctgacgtggcgagaaacagactttttatatcaacaggctcatcaggaatcaaaacagaataaacttgaagaactgcgcattttgtcccgtgctaatccacaactggctaataccactaaccttaatattacaccgtcaaccctaaacaatagttacaacagttggttttatggccgtgcccaccgttttgtaaaaccgggatcaattgcttccatattttcaccagcggcttatttaacagaattatatcgggaagcgaaagattttcatcctgacaattctcaatatcacctgaataaacgacgccccgacattgcttcactggcactgacacagaataatatggatgaagaaatttccacattatccttatctaatgaattactgctgcataatattcagacgttagagaaaactgactataacggtgtaatgaaaatgttgtccacttaccggcaaaccggcatgacaccctatcatctgccgtatgagtcagcccgtcaggcaattttattgcaagataaaaacctcaccgcatttagccgtaatacagacgtagcggaattaatggacccaacatcgctactggctattaagactgatatatcgcctgaattgtatcaaatccttgtagaagaaattacaccggaaaattcaacagaactgatgaagaaaaatttcggtacagatgatgtactgatttttaagagttatgcttctttggctcgctactacgatttgtcttatgatgaactcagtttatttgtcaatctctccttcggtaagaaaaatacaaatcaacagtataagaatgagcaactgataacattggtcaatgacgggaatgatacggcaacggcaagattgattaagcgaacccgcaaagatttctacgattcacatttaaactatgcagaactaattccaatcaaagaaaatgaatacaaatataatttcagtgtaaaaaaaacagaacctgaccacttggattttcgtctccagaatggagataaagaatatatataccaagataaaaatttcgtccccattgctaatacccattacagtattcccattaaattgacgacagagcaaatcaccaacggtataacactccgcttatggcgagttaaaccaaatccgtcggatgctatcaatgccaatgcatactttaaaatgatggagttccccggtgatatattcctgttaaagctgaataaagcgattcgtttgtataaagccacaggcatatctccagaagatatctggcaagtaatagaaagtatttatgatgacttaaccattgacagcaatgtgttgggtaagctgttttatgttcaatattatatgcagcactataatattagcgtcagcgatgcgctggtattgtgtcattcagatatcagccaatattccactaaacaacaacccagtcattttacaatactgttcaatacaccgctattaaatggccaagagttttctgctgataataccaaactggatttaacccccggtgaatcaaaaaaccatttttatttgggaataatgaaacgtgctttcagagtgaatgatactgaactgtatacattatggaagctggctaatggcggaacaaatccagaatttatgtgttccatcgagaacctgtctctgctttatcgcgttcgtctgctggcagacattcatcatctgacagtgaatgaattatccatgttgttgtcggtttctccctatgtgaacacgaaaattgcccttttttctgatacagcattaacgcaattaatcagctttctgttccaatgcacccagtggctgacaacacagaaatggtctgtcagtgatgtgtttctgatgaccacggataattacagcactgtccttacgccggatattgaaaaccttatcacgacactaagtaatggattatcaacactttcactcggtgatgacgaactgatccgtgcagctgccccgctgattgctgccagcattcaaatggattcagccaagacagcagaaactattttgctgtggattaatcagataaaaccacaaggactgacattcgatgatttcatgattattgcggctaaccgtgatcgctcagagaatgaaaccagcaacatggtggctttttgtcaggtactggggcaactttctctgattgtgcgcaatattggactcagcgaaaacgaactgaccctgttggtgacaaaaccggagaaattccaatcagaaaccacagcactgcaacatgatctccccactttgcaagcgctgacccgcttccatgctgtgatcatgcgttgtggaagctacgcgacagaaatcttaacagcattggaactaggagcgctgactgccgaacaattggcggtggcgttaaaatttgatgctcaggttgtgacacaagcattgcaacagaccggtttgggagtgaatacctttaccaactggagaactatagatgtcactctgcaatggctggatgtcgctgctacattgggtattaccccggatggtgttgctgcactcataaaattaaaatatatcggtgaaccagaaaccccgatgccaacatttgatgattggcaagccgccagtactttgttgcaggcgggactgaacagtcaacaatccgaccagcttcaggcatggctggatgaagccacgacgacagcggccagtgcttactacatcaaaaatagtgcacctcaacagattaagagccgggatgagttgtacagctatctgctgattgataaccaagtttctgcccaagtgaaaaccacccgtgtggcagaagccattgccagcattcagttatatgtcaaccgggcgttgaataatgttgaaggaaaagtatcaaagccagtgaaaacccgtcagttcttctgcgactgggaaacctacaatcgacggtatagcacctgggccggcgtatctgaactggcctattatccggaaaactatatcgaccccacgattcgtattggtcagacaggtatgatgaacaacctgttacagcaactttcccaaagtcagttaaatatcgataccgttgaagatagctttaaaaattatctgaccgcatttgaagatgtcgctaacttgcaggtgattagcggatatcatgacagtatcaatgtcaatgagggactcacttatttaattggttatagccagacagaacccagaatatattattggcgcaatgtcgatcaccaaaagtgccagcacggtcaatttgctgccaatgcctggggagaatggaaaaaaattgaaatacccatcaatgtatggcaggaaaatatcagacctgttatttacaagtctcgtttgtatttactgtggctggaacaaaaagagctgaaaaatgaaagtgaagatggcaagatagatatcactgattatatattaaaactgtcacatattcgttatgatggcagctggagctcaccgtttaattttaatgtgactgataaaatagaaaacctgatcaataaaaaagccagcattggtatgtattgttcttctgattatgaaaaagacgtcattattgtttatttccatgagaaaaaagacaattattcttttaatagtcttcctgcaagagaagggatgaccattaaccctgatatgacattatccattctcacagaaaatgatttagacgccattgttaagagcacattatcagaacttgataccaggacagaatacaaagtcaacaatcaatttgctacagattatttggccgaatataaggaatctataaccacaaaaaataaattagccagttttaccggaaatatttttgatctctcgtatatatcaccaggaaatggtcatattaatttaacgttcaatccttcaatggaaattaatttttcaaaaggcaatatatataatgatgaggttaaatacctgttatcgatggtagaagatgaaacggttattttatttgattatgatagacatgatgaaatgcttggaaaagaagaagaagtttttcattatggaactttggattttattatttccatcgatcttaaaaatgccgaatattttagagtgttaatgcatctaagaaccaaggaaaaaattcctagaaaatcagaaattggagttggtataaattatgattatgaatcaaatgatgctgaattcaaacttgatactaacatagtattagattggaaagataacacaggagtatggcatactatatgtgaatcatttactaatgatgtttcaatcattaataacatgggaaatattgcggcactgttccttcgcgaggatccatgtgtgtatttatgttcaatagccacagatataaaaattgcttcatctatgatcgaacagatccaagataaaaacattagttttttattaaaaaatggctctgatattctagtggagttaaatgctgaagaccatgtggcatctaaaccttcacacgaatctgaccctatggtatatgattttaatcaagtaaaagttgatattgaaggctatgatattcctctggtgagcgagtttattattaagcaacccgacggcggttataacgatattgttattgaatcgccaattcatataaaactaaaatccaaagatacaagtaacgttatatcactgcataaaatgccatcaggcacacaatatatgcagattggcccttacagaacccggttaaatactttattttccagaaaattagctgaaagagccaatattggtattgataatgttttaagtatggaaacgcaaaatttaccagagccgcaattaggtgaagggttttatgcgacatttaagttgcccccctacaataaagaggagcatggtgatgaacgttggtttaagatccatattgggaatattgatggcaattctgccagacaaccttattacgaaggaatgttatctgatattgaaaccacagtaacgctctttgttccctatgctaaaggatattacatacgtgaaggtgtcagattaggggttgggtacaaaaaaattatctatgacaaatcctgggaatctgctttcttttattttgatgagacgaaaaatcaatttatattcattaatgatgccgatcatgattcgggaatgacacaacaggggatagtaaaaaatatcaaaaaatataaagggtttattcatgtcgttgtcatgaaaaataacactgaacccatggatttcaacggcgccaatgcaatctatttctgggaattgttctattacacgcccatgatggtattccagcgcttattgcaagagcagaattttaccgaatcgacacgctggctgcgctatatctggaacccggccggatattcggttcagggtgaaatgcaggattattactggaacgtccgcccattggaggaagatacgtcctggaatgccaatccgctggattcggtcgatcctgacgccgttgcccagcatgatccgatgcactataaagtggctacctttatgaaaatgctggatttgttgattacccgcggagatagcgcctatcgccagcttgaacgtgataccttaaacgaagctaaaatgtggtatgtacaggcgctcactttattgggtgatgagccttatttttcattggataacgattggtcagagccacggctggaagaagctgccagccaaacaatgcggcatcattatcaacataaaatgctgcaactgcgtcagcgcgctgcattacccacgaaacgtacggcaaattcgttaaccgcattgttcctccctcaaattaataaaaaactgcaaggttactggcagacattgacgcaacgcctctataacttacgccataacctgacaatcgacggtcagccactgtcattatctctctatgccacgcccgcagatccgtccatgttactcagtgctgccatcactgcttcacaaggcggcggcgatttacctcatgcagtgatgccgatgtaccgttttccggtgattctggaaaatgccaagtggggggtaagccagttgatacaatttggcaataccctgctcagcattactgaacggcaggatgcagaagccttggctgaaatactgcaaactcaaggcagtgagttagccctgcaaagtattaaaatgcaggataaggtcatggctgaaattgatgctgataaattggcgcttcaagaaagccgtcatggtgcacagtctcgttttgacagtttcaatacgctgtacgacgaagatgttaacgctggtgaaaaacaagcgatggatctttacctctcttcatcggtcttgagcaccagcggcacagccctgcatatggccgccgccgcggcagatctcgtccccaatatttacggttttgctgtgggaggttcccgttttggggcgcttttcaatgccagtgcgattggtatcgaaatttctgcgtcagcaacacgtattgccgcagacaaaatcagccaatcagaaatataccgtcgccgtcggcaagagtgggaaattcagcgcaataatgcggaagctgagataaaacaaattgatgctcaattagcgacgctggctgtacgtcgtgaagcggcagtattacaaaaaaactatctggaaactcagcaggcacaaactcaggcgcagttagcctttctgcaaagtaaattcagtaatgcagcgctatacaactggctccgtggaaggttgtccgctatttattatcagttttatgatttggcggtctcactctgtttaatggcagagcaaacttatcagtatgaattgaataatgcggcagcacactttattaaaccaggtgcctggcatgggacttatgcgggtttattagcgggtgaaaccctgatgctgaatttagcacagatggaaaaaagctatttggaaaaagatgaacgggcactggaggtcaccagaaccgtttctctggctgaagtgtatgctggtctgacagaaaatagtttcattttaaaagataaagtgactgagttagtcaatgcaggtgaaggcagtgcaggcacaacgcttaacggtttgaacgtcgaagggacacaactgcaagccagcctcaaattatcggatctgaatattgctaccgattatcctgacggtttaggtaatacacgccgtatcaaacaaatcagtgtgacattacctgcccttttagggccttatcaggatgttcgggcaatactaagttatggcggcagcacaatgatgccacgtggctgcaaagcgattgcgatctcacatggcatgaatgacagtggtcaattccagatggatttcaatgatgccaagtacctgccatttgaagggcttcctgtggccgatacaggcacattaaccctcagttttcccggtatcagtggtaaacagaaaagcttattgctcagcctgagcgatatcattctgcatatccgttacaccattcgttct

SEQ ID NO: 62 - DNA, 7614 bp, Xenorhabdus nematophilus
atgtatagcacggctgtattactcaataaaatcagtcccactcgcgacggtcagacgatgactcttgcggatctgcaatatttatccttcagtgaactgagaaaaatctttgatgaccagctcagttggggagaggctcgccatctctatcatgaaactatagagcagaaaaaaaataatcgcttgctggaagcgcgtatttttacccgtgccaacccacaattatccggtgctatccgactcggtattgaacgagacagcgtttcacgcagttatgatgaaatgtttggtgcccgttcttcttcctttgtgaaaccgggttcagtggcttccatgttttcaccggctggctatctcaccgaattgtatcgtgaagcgaaggacttacatttttcaagctctgcttatcatcttgataatcgccgtccggatctggctgatctgactctgagccagagtaatatggatacagaaatttccaccctgacactgtctaacgaactgttgctggagcatattacccgcaagaccggaggtgattcggacgcattgatggagagcctgtcaacttaccgtcaggccattgataccccttaccatcagccttacgagactatccgtcaggtcattatgacccatgacagtacactgtcagcgctgtcccgtaatcctgaggtgatggggcaggcggaaggggcttcattactggcgattctggccaatatttctccggagctttataacattttgaccgaagagattacggaaaagaacgctgatgctttatttgcgcaaaacttcagtgaaaatatcacgcccgaaaatttcgcgtcacaatcatggatagccaagtattatggtcttgaactttctgaggtgcaaaaatacctcgggatgttgcagaatggctattctgacagcacctctgcttatgtggataatatctcaacgggtttagtggtcaataatgaaagtaaactcgaagcttacaaaataacacgtgtaaaaacagatgattatgataaaaatataaattactttgatttgatgtatgaaggaaataatcagttctttatacgtgctaattttaaggtatcaagagaatttggggctactcttagaaaaaacgcagggccaagtggcattgtcggcagcctttccggtcctctaatagccaatacgaattttaaaagtaattatctaagtaacatatctgattctgaatacaaaaacggtgtaaagatatacgcctatcgctatacgtcttccaccagcgccacaaatcagggcggcggaatattcacttttgagtcttatcccctgactatatttgcgctcaaactgaataaagccattcgcttgtgcctgactagcgggctttcaccgaatgaactgcaaactatcgtacgcagtgacaatgcacaaggcatcatcaacgactccgttctgaccaaagttttctatactctgttctacagtcaccgttatgcactgagctttgatgatgcacaggtactgaacggatcggtcattaatcaatatgccgacgatgacagtgtcagtcattttaaccgtctctttaatacaccgccgctgaaagggaaaatctttgaagccgacggcaacacggtcagcattgatccggatgaagagcaatctacctttgcccgttcagccctgatgcgtggtctgggggtcaacagtggtgaactgtatcagttaggcaaactggcgggtgtgctggacgcccaaaataccatcacactttctgtcttcgttatctcttcactgtatcgcctcacgttactggcccgtgtccatcagctgacggtcaatgaactgtgtatgctttatggtctttcgccgttcaatggcaaaacaacggcttctttgtcttccggggagttgccacggctggttatctggctgtatcaggtgacgcagtggctgactgaggcggaaatcaccactgaagcgatctggttattatgtacgccagagtttagcgggaatatttcaccggaaatcagtaatctgctcaataacctccgaccgagtattagtgaagatatggcacagagtcacaatcgggagctgcaggctgaaattctcgcgccgtttattgctgcaacgctgcatctggcgtcaccggatatggcacggtatatcctgttgtggaccgataacctgcggccgggtggcttagatattgccgggtttatgacactggtattgaaagagtcgttaaatgccaatgaaaccacccaattggtacaattctgccatgtgatggcacagttatcgctttccgtacagacactgcgcctcagtgaagcggagctatccgtgctggtcatctccggattcgccgtgctgggggcaaaaaatcaacctgccggacagcacaatattgatacgctattctcactctaccgattccaccagtggattaatgggctgggcaatcccggctctgacacgctggatatgctgcgccagcagacactcacggccgacagactggcctccgtgatggggctggacatcagtatggtaacgcaggccatggtttccgccggcgtgaaccagcttcagtgttggcaggatatcaacaccgtgttgcagtggatagatgtggcatcagcactgcacacgatgccgtcggttatccgtacgctggtgaatatccgttacgtgactgcattaaacaaagccgagtcgaatctgccttcctgggatgagtggcagacactggcagaaaatatggaagccggactcagtacacaacaggctcagacgctggcggattataccgcggagcgcctgagtagcgtgctgtgcaattggtttctggcgaatatccagccagaaggggtgtccctgcacagccgggatgacctgtacagctatttcctgattgataatcaggtctcttctgccataaaaaccacccgactggcagaggccattgccggtattcagctctacatcaaccgggcgctgaatcggatagagcctaatgcccgtgccgatgtgtcaacccgccagttttttaccgactggacggtgaataaccgttacagcacctggggcggggtgtcgcggctggtttattatccggaaaattacattgacccaacccagcgtatcgggcagacccggatgatggatgaactgctggaaaatatcagccagagtaaacttagccgggacacagtggaggatgcctttaaaacttacctgacccgctttgaaaccgtggcggatctgaaagttgtcagcgcctatcacgacaacgtcaacagcaacaccggactgacctggtttgtcggccaaacgcgggagaacctgccggaatactactggcgtaacgtggatatatcacggatgcaggcgggtgaactggccgccaatgcctggaaagagtggacgaagattgatacagcggtcaacccctacaaggatgcaatacgtccggtcatattcagggaacgtttgcaccttatctgggtagaaaaagaggaagtggcgaaaaatggtactgatccggtggaaacctatgaccgttttactctgaaactggcgtttctgcgtcatgatggcagttggagtgccccctggtcttacgatatcacaacgcaggtggaggcggtcactgacaaaaaacctgacactgaacggctggcgctggccgcatcaggctttcagggcgaggacactctgctggtgtttgtctacaaaaccgggaagagttactcggattttggcggcagcaataaaaatgtggcaggcatgaccatttacggcgatggctccttcaaaaagatggagaacacagcactcagccgttacagccaactgaaaaatacctttgatatcattcatactcaaggcaacgacttggtaagaaaggccagctatcgtttcgcgcaggattttgaagtgcctgcctcgttgaatatgggttctgccatcggtgatgatagtctgacggtgatggagaacgggaatattccgcagataaccagtaaatactccagcgataaccttgctattacgctacataacgccgctttcactgtcagatatgatggcagtggcaatgtcatcagaaacaaacaaatcagcgccatgaaactgacgggggtggatggaaagtcccagtacggcaatgcatttatcatcgcaaataccgttaaacattatggcggttactctgatctgggggggccgatcaccgtttataataaaacgaaaaactatattgcatcagttcaaggccacttgatgaacgcagattacactaggcgtttgattctaacaccagttgaaaataattattatgccagattgttcgagtttccattttctccaaacacaattttaaacaccgttttcacggttggtagcaataaaaccagtgattttaaaaagtgcagttatgctgttgatggtaataattctcagggcttccagatatttagttcctatcaatcatccggctggctggatattgatacaggcattaacaataccgatatcaaaattacggtgatggctggcagtaaaacccacacctttacggccagtgaccatattgcttccttgccggcaaacagttttgatgctatgccgtacacctttaagccactggaaatcgatgcttcatcgttggcctttaccaataatattgctcctctggatatcgtttttgagaccaaagccaaagacgggcgagtgctgggtaagatcaagcaaacattatcggtgaaacgggtaaattataatccggaagatattctgtttctgcgtgaaactcattcgggtgcccaatatatgcagctcggggtgtatcgtattcgtcttaataccctgctggcttctcaactggtatccagagcaaacacgggcattgatactatcctgacaatggaaacccagcggttaccggaacctccgttgggagaaggcttctttgccaactttgttctgcctaaatatgaccctgctgaacatggcgatgagcggtggtttaaaatccatattgggaatgttggcggtaacacgggaaggcagccttattacagcggaatgttatccgatacgtcggaaaccagtatgacactgtttgtcccttatgccgaagggtattacatgcatgaaggtgtcagattgggggttggataccagaaaattacctatgacaacacttgggaatctgctttcttttattttgatgagacaaaacagcaatttgtattaattaacgatgctgatcatgattcaggaatgacgcaacaggggatcgtgaaaaatatcaagaaatacaaaggatttttgaatgtttctatcgcaacgggctattccgccccgatggatttcaatagtgccagcgccctctattactgggaattgttctattacaccccgatgatgtgcttccagcgtttgctacaggaaaaacaattcgacgaagccacacaatggataaactacgtctacaatcccgccggctatatcgttaacggagaaatcgccccctggatctggaactgccggccgctggaagagaccacctcctggaatgccaatccgctggatgccatcgatccggatgccgtcgcccaaaatgacccaatgcactacaagattgccacctttatgcgcctgttggatcaacttattctgcgcggcgatatggcctatcgagaactgacccgcgatgcgttgaatgaagccaaaatgtggtatgtgcgtactttagaattgctcggtgatgagccggaggattacggtagccaacagtgggcagcaccgtccctttccggggcggcgagtcaaaccgtgcaggcggcttatcagcaggatcttacgatgctgggccgtggtggggtttccaagaatctccgtaccgctaactcgttggtgggtttgttcctgccggaatataacccggcgctcaccgattactggcaaaccctgcgtttgcgcctgtttaacctgcgccataatctttccattgacggacagccgttatcgctggcgatttacgccgagcctaccgatccgaaagcgctgctcaccagtatggtacaggcctctcagggcggtagtgcagtgctgcccggcacattgtcgttataccgcttcccggtgatgctggagcggacccgcaatctggtagcgcaattaacccagttcggcacctctctgctcagtatggcagagcatgatgatgccgatgaactcaccacgctgctactacagcagggtatggaactggcgacacagagcatccgtattcagcaacgaactgtcgatgaagtggatgctgatattgctgtattggcagagagccgccgcagtgcacaaaatcgtctggaaaaataccagcagctgtatgacgaggatatcaaccacggagaacagcgggcaatgtcactgcttgatgcagcggcaggtcagtctctggccgggcaggtgctttcaatagcggaaggggtggccgatttagtgccaaacgtgttcggtttagcttgtggcggcagtcgttggggggcagcactgcgtgcttccgcctccgtgatgtcgctttctgccacagcttcccaatattccgcagacaaaatcagccgttcggaagcctaccgccgccgccgtcaggagtgggaaattcagcgtgataatgctgacggtgaagtcaaacaaatggatgcccagttggaaagcctgaaaatccgccgcgaagcagcacagatgcaggtggaatatcaggagacccagcaggcccatactcaggctcagttagagctgttacagcgtaaattcacaaacaaagcgctttacagttggatgcgcggcaagctgagtgctatctattaccagttctttgacctgacccagtccttctgcctgatggcacaggaagcgctgcgccgcgagctgaccgacaacggtgttacctttatccggggtggggcctggaacggtacgactgcgggtttgatggcgggtgaaacgttgctgctgaatctggcagaaatggaaaaagtctggctggagcgtgatgagcgggcactggaagtgacccgtaccgtctcgttggcacagttctatcaggccttatcatcagacaactttaatctgaccgaaaaactcacgcaattcctgcgtgaagggaaaggcaacgtaggagcttccggcaatgaattaaaactcagtaaccgtcagatagaagcctcagtgcgattgtctgatttgaaaattttcagcgactaccccgaaagccttggcaatacccgtcagttgaaacaggtgagtgtcaccttgccggcgctggttgggccgtatgaagatattcgggcggtgctgaattacgggggcagcatcgtcatgccacgcggttgcagtgctattgctctctcccacggcgtgaatgacagtggtcaatttatgctggatttcaacgattcccgttatctgccgtttgaaggtatttccgtgaatgacagcggcagcctgacgttgagtttcccggatgcgactgatcggcagaaagcgctgctggagagcctgagcgatatcattctgcatatccgctataccattcgttct

SEQ ID NO: 63 - DNA, 7515 bp, Photorhabdus luminescens
atgcaaaactcattatcaagcactatcgatactatttgtcagaaactgcaattaacttgtccggcggaaattgctttgtatccctttgatactttccgggaaaaaactcggggaatggttaattggggggaagcaaaacggatttatgaaattgcacaagcggaacaggatagaaacctacttcatgaaaaacgtatttttgcctatgctaatccgctgctgaaaaacgctgttcggttgggtacccggcaaatgttgggttttatacaaggttatagtgatctgtttggtaatcgtgctgataactatgccgcgccgggctcggttgcatcgatgttctcaccggcggcttatttgacggaattgtaccgtgaagccaaaaacttgcatgacagcagctcaatttattacctagataaacgtcgcccggatttagcaagcttaatgctcagccagaaaaatatggatgaggaaatttcaacgctggctctctctaatgaattgtgccttgccgggatcgaaacaaaaacaggaaaatcacaagatgaagtgatggatatgttgtcaacttatcgtttaagtggagagacaccttatcatcacgcttatgaaactgttcgtgaaatcgttcatgaacgtgatccaggatttcgtcatttgtcacaggcacccattgttgctgctaagctcgatcctgtgactttgttgggtattagctcccatatttcgccagaactgtataacttgctgattgaggagatcccggaaaaagatgaagccgcgcttgatacgctttataaaacaaactttggcgatattactactgctcagttaatgtccccaagttatctggcccggtattatggcgtctcaccggaagatattgcctacgtgacgacttcattatcacatgttggatatagcagtgatattctggttattccgttggtcgatggtgtgggtaagatggaagtagttcgtgttacccgaacaccatcggataattataccagtcagacgaattatattgagctgtatccacagggtggcgacaattatttgatcaaatacaatctaagcaatagttttggtttggatgatttttatctgcaatataaagatggttccgctgattggactgagattgcccataatccctatcctgatatggtcataaatcaaaagtatgaatcacaggcgacaatcaaacgtagtgactctgacaatatactcagtatagggttacaaagatggcatagcggtagttataattttgccgccgccaattttaaaattgaccaatactccccgaaagctttcctgcttaaaatgaataaggctattcggttgctcaaagctaccggcctctcttttgctacgttggagcgtattgttgatagtgttaatagcaccaaatccatcacggttgaggtattaaacaaggtttatcgggtaaaattctatattgatcgttatggcatcagtgaagagacagccgctattttggctaatattaatatctctcagcaagctgttggcaatcagcttagccagtttgagcaactatttaatcacccgccgctcaatggtattcgctatgaaatcagtgaggacaactccaaacatcttcctaatcctgatctgaaccttaaaccagacagtaccggtgatgatcaacgcaaggcggttttaaaacgcgcgtttcaggttaacgccagtgagttgtatcagatgttattgatcactgatcgtaaagaagacggtgttatcaaaaataacttagagaatttgtctgatctgtatttggttagtttgctggcccagattcataacctgactattgctgaattgaacattttgttggtgatttgtggctatggcgacaccaacatttatcagattaccgacgataatttagccaaaatagtggaaacattgttgtggatcactcaatggttgaagacccaaaaatggacagttaccgacctgtttctgatgaccacggccacttacagcaccactttaacgccagaaattagcaatctgacggctacgttgtcttcaactttgcatggcaaagagagtctgattggggaagatctgaaaagagcaatggcgccttgcttcacttcggctttgcatttgacttctcaagaagttgcgtatgacctgctgttgtggatagaccagattcaaccggcacaaataactgttgatgggttttgggaagaagtgcaaacaacaccaaccagcttgaaggtgattacctttgctcaggtgctggcacaattgagcctgatctatcgtcgtattgggttaagtgaaacggaactgtcactgatcgtgactcaatcttctctgctagtggcaggcaaaagcatactggatcacggtctgttaaccctgatggccttggaaggttttcatacctgggttaatggcttggggcaacatgcctccttgatattggcggcgttgaaagacggagccttgacagttaccgatgtagcacaagctatgaataaggaggaatctctcctacaaatggcagctaatcaggtggagaaggatctaacaaaactgaccagttggacacagattgacgctattctgcaatggttacagatgtcttcggccttggcggtttctccactggatctggcagggatgatggccctgaaatatgggatagatcataactatgctgcctggcaagctgcggcggctgcgctgatggctgatcatgctaatcaggcacagaaaaaactggatgagacgttcagtaaggcattatgtaactattatattaatgctgttgtcgatagtgctgctggagtacgtgatcgtaacggtttatatacctatttgctgattgataatcaggtttctgccgatgtgatcacttcacgtattgcagaagctatcgccggtattcaactgtacgttaaccgggctttaaaccgagatgaaggtcagcttgcatcggacgttagtacccgtcagttcttcactgactgggaacgttacaataaacgttacagtacttgggctggtgtctctgaactggtctattatccagaaaactatgttgatcccactcagcgcattgggcaaaccaaaatgatggatgcgctgttgcaatccatcaaccagagccagctaaatgcggatacggtggaagatgctttcaaaacttatttgaccagctttgagcaggtagcaaatctgaaagtaattagtgcttaccacgataatgtgaatgtggatcaaggattaacttattttatcggtatcgaccaagcagctccgggtacgtattactggcgtagtgttgatcacagcaaatgtgaaaatggcaagtttgccgctaatgcttggggtgagtggaataaaattacctgtgctgtcaatccttggaaaaatatcatccgtccggttgtttatatgtcccgcttatatctgctatggctggagcagcaatcaaagaaaagtgatgatggtaaaaccacgatttatcaatataacttaaaactggctcatattcgttacgacggtagttggaatacaccatttacttttgatgtgacagaaaaggtaaaaaattacacgtcgagtactgatgctgctgaatctttagggttgtattgtactggttatcaaggggaagacactctattagttatgttctattcgatgcagagtagttatagctcctataccgataataatgcgccggtcactgggctatatattttcgctgatatgtcatcagacaatatgacgaatgcacaagcaactaactattggaataacagttatccgcaatttgatactgtgatggcagatccggatagcgacaataaaaaagtcataaccagaagagttaataaccgttatgcggaggattatgaaattccttcctctgtgacaagtaacagtaattattcttggggtgatcacagtttaaccatgctttatggtggtagtgttcctaatattacttttgaatcggcggcagaagatttaaggctatctaccaatatggcattgagtattattcataatggatatgcgggaacccgccgtatacaatgtaatcttatgaaacaatacgcttcattaggtgataaatttataatttatgattcatcatttgatgatgcaaaccgttttaatctggtgccattgtttaaattcggaaaagacgagaactcagatgatagtatttgtatatataatgaaaacccttcctctgaagataagaagtggtatttttcttcgaaagatgacaataaaacagcggattataatggtggaactcaatgtatagatgctggaaccagtaacaaagatttttattataatctccaggagattgaagtaattagtgttactggtgggtattggtcgagttataaaatatccaacccgattaatatcaatacgggcattgatagtgctaaagtaaaagtcaccgtaaaagcgggtggtgacgatcaaatctttactgctgataatagtacctatgttcctcagcaaccggcacccagttttgaggagatgatttatcagttcaataacctgacaatagattgtaagaatttaaatttcatcgacaatcaggcacatattgagattgatttcaccgctacggcacaagatggccgattcttgggtgcagaaacttttattatcccggtaactaaaaaagttctcggtactgagaacgtgattgcgttatatagcgaaaataacggtgttcaatatatgcaaattggcgcatatcgtacccgtttgaatacgttattcgctcaacagttggttagccgtgctaatcgtggcattgatgcagtgctcagtatggaaactcagaatattcaggaaccgcaattaggagcgggcacatatgtgcagcttgtgttggataaatatgatgagtctattcatggcactaataaaagctttgctattgaatatgttgatatatttaaagagaacgatagttttgtgatttatcaaggagaacttagcgaaacaagtcaaactgttgtgaaagttttcttatcctattttatagaggcgactggaaataagaaccacttatgggtacgtgctaaataccaaaaggaaacgactgataagatcttgttcgaccgtactgatgagaaagatccgcacggttggtttctcagcgacgatcacaagacctttagtggtctctcttccgcacaggcattaaagaacgacagtgaaccgatggatttctctggcgccaatgctctctatttctgggaactgttctattacacgccgatgatgatggctcatcgtttgttgcaggaacagaattttgatgcggcgaaccattggttccgttatgtctggagtccatccggttatatcgttgatggtaaaattgctatctaccactggaacgtgcgaccgctggaagaagacaccagttggaatgcacaacaactggactccaccgatccagatgctgtagcccaagatgatccgatgcactacaaggtggctacctttatggcgacgttggatctgctaatggcccgtggtgatgctgcttaccgccagttagagcgtgatacgttggctgaagctaaaatgtggtatacacaggcgcttaatctgttgggtgatgagccacaagtgatgctgagtacgacttgggctaatccaacattgggtaatgctgcttcaaaaaccacacagcaggttcgtcagcaagtgcttacccagttgcgtctcaatagcagggtaaaaaccccgttgctaggaacagccaattccctgaccgctttattcctgccgcaggaaaatagcaagctcaaaggctactggcggacactggcgcagcgtatgtttaatttacgtcataatctgtcgattgacggccagccgctctccttgccgctgtatgctaaaccggctgatccaaaagctttactgagtgcggcggtttcagcttctcaagggggagccgacttgccgaaggcgccgctgactattcaccgcttccctcaaatgctagaaggggcacggggcttggttaaccagcttatacagttcggtagttcactattggggtacagtgagcgtcaggatgcggaagctatgagtcaactactgcaaacccaagccagcgagttaatactgaccagtattcgtatgcaggataaccaattggcagagctggattcggaaaaaaccgccttgcaagtctctttagctggagtgcaacaacggtttgacagctatagccaactgtatgaggagaacatcaacgcaggtgagcagcgagcgctggcgttacgctcagaatctgctattgagtctcagggagcgcagatttcccgtatggcaggcgcgggtgttgatatggcaccaaatatcttcggcctggctgatggcggcatgcattatggtgctattgcctatgccatcgctgacggtattgagttgagtgcttctgccaagatggttgatgcggagaaagttgctcagtcggaaatatatcgccgtcgccgtcaagaatggaaaattcagcgtgacaacgcacaagcggagattaaccagttaaacgcgcaactggaatcactgtctattcgccgtgaagccgctgaaatgcaaaaagagtacctgaaaacccagcaagctcaggcgcaggcacaacttactttcttaagaagcaaattcagtaatcaagcgttatatagttggttacgagggcgtttgtcaggtatttatttccagttctatgacttggccgtatcacgttgcctgatggcagagcaatcctatcaatgggaagctaatgataattccattagctttgtcaaaccgggtgcatggcaaggaacttacgccggcttattgtgtggagaagctttgatacaaaatctggcacaaatggaagaggcatatctgaaatgggaatctcgcgctttggaagtagaacgcacggtttcattggcagtggtttatgattcactggaaggtaatgatcgttttaatttagcggaacaaatacctgcattattggataagggggagggaacagcaggaactaaagaaaatgggttatcattggctaatgctatcctgtcagcttcggtcaaattgtccgacttgaaactgggaacggattatccagacagtatcgttggtagcaacaaggttcgtcgtattaagcaaatcagtgtttcgctacctgcattggttgggccttatcaggatgttcaggctatgctcagctatggtggcagtactcaattgccgaaaggttgttcagcgttggctgtgtctcatggtaccaatgatagtggtcagttccagttggatttcaatgacggcaaatacctgccatttgaaggtattgctcttgatgatcagggtacactgaatcttcaatttccgaatgctaccgacaagcagaaagcaatattgcaaactatgagcgatattattttgcatattcgttataccatccgttaa

SEQ ID NO: 64 - DNA, 7551 bp, Photorhabdus luminescens
atgaacgagtctgtaaaagagatacctgatgtattaaaaagccagtgtggttttaattgtctgacagatattagccacagctcttttaatgaatttcgccagcaagtatctgagcacctctcctggtccgaaacacacgacttatatcatgatgcacaacaggcacaaaaggataatcgcctgtatgaagcgcgtattctcaaacgcgccaatccccaattacaaaatgcggtgcatcttgccattctcgctcccaatgctgaactgataggctataacaatcaatttagcggtagagccagtcaatatgttgcgccgggtaccgtttcttccatgttctcccccgccgcttatttgactgaactttatcgtgaagcacgcaatttacacgcaagtgactccgtttattatctggatacccgccgcccagatctcaaatcaatggcgctcagtcagcaaaatatggatatagaattatccacactctctttgtccaatgagctgttattggaaagcattaaaactgaatctaaactggaaaactatactaaagtgatggaaatgctctccactttccgtccttccggcgcaacgccttatcatgatgcttatgaaaatgtgcgtgaagttatccagctacaagatcctggacttgagcaactcaatgcatcaccggcaattgccgggttgatgcatcaagcctccctattgggtattaacgcttcaatctcgcctgagctatttaatattctgacggaggagattaccgaaggtaatgctgaggaactttataagaaaaattttggtaatatcgaaccggcctcattggctatgccggaataccttaaacgttattataatttaagcgatgaagaacttagtcagtttattggtaaagccagcaattttggtcaacaggaatatagtaataaccaacttattactccggtagtcaacagcagtgatggcacggttaaggtatatcggatcacccgcgaatatacaaccaatgcttatcaaatggatgtggagctatttcccttcggtggtgagaattatcggttagattataaattcaaaaatttttataatgcctcttatttatccatcaagttaaatgataaaagagaacttgttcgaactgaaggcgctcctcaagtcaatatagaatactccgcaaatatcacattaaataccgctgatatcagtcaaccttttgaaattggcctgacacgagtacttccttccggttcttgggcatatgccgccgcaaaatttaccgttgaagagtataaccaatactcttttctgctaaaacttaacaaggctattcgtctatcacgtgcgacagaattgtcacccacgattctggaaggcattgtgcgcagtgttaatctacaactggatatcaacacagacgtattaggtaaagtttttctgactaaatattatatgcagcgttatgctattcatgctgaaactgccctgatactatgcaacgcgcctatttcacaacgttcatatgataatcaacctagccaatttgatcgcctgtttaatacgccattactgaacggacaatatttttctaccggcgatgaggagattgatttaaattcaggtagcaccggcgattggcgaaaaaccatacttaagcgtgcatttaatattgatgatgtctcgctcttccgcctgcttaaaattaccgaccatgataataaagatggaaaaattaaaaataacctaaagaatctttccaatttatatattggaaaattactggcagatattcatcaattaaccattgatgaactggatttattactgattgccgtaggtgaaggaaaaactaatttatccgctatcagtgataagcaattggctaccctgatcagaaaactcaatactattaccagctggctacatacacagaagtggagtgtattccagctatttatcatgacctccaccagctataacaaaacgctaacgcctgaaattaagaatttgctggataccgtctaccacggtttacaaggttttgataaagacaaagcagatttgctacatgtcatggcgccctatattgcggccaccttgcaattatcatcggaaaatgtcgcccactcggtactcctttgggcagataagttacagcccggcgacggcgcaatgacagcagaaaaattctgggactggttgaatactaagtatacgccgggttcatcggaagccgtagaaacgcaggaacatatcgttcagtattgtcaggctctggcacaattggaaatggtttaccattccaccggcatcaacgaaaacgccttccgtctatttgtgacaaaaccagagatgtttggcgctgcaactggagcagcgcccgcgcatgatgccctttcactgattatgctgacacgttttgcggattgggtgaacgcactaggcgaaaaagcgtcctcggtgctagcggcatttgaagctaactcgttaacggcagaacaactggctgatgccatgaatcttgatgctaatttgctgttgcaagccagtattcaagcacaaaatcatcaacatcttcccccagtaactccagaaaatgcgttctcctgttggacatctatcaatactatcctgcaatgggttaatgtcgcacaacaattgaatgtcgccccacagggcgtttccgctttggtcgggctggattatattcaatcaatgaaagagacaccgacctatgcccagtgggaaaacgcggcaggcgtattaaccgccgggttgaattcacaacaggctaatacattacacgcttttctggatgaatctcgcagtgccgcattaagcacctactatatccgtcaagtcgccaaggcagcggcggctattaaaagccgtgatgacttgtatcaatacttactgattgataatcaggtttctgcggcaataaaaaccacccggatcgccgaagccattgccagtattcaactgtacgtcaaccgggcattggaaaatgtggaagaaaatgccaattcgggggttatcagccgccaattctttatcgactgggacaaatacaataaacgctacagcacttgggcgggtgtttctcaattagtttactacccggaaaactatattgatccgaccatgcgtatcggacaaaccaaaatgatggacgcattactgcaatccgtcagccaaagccaattaaacgccgataccgtcgaagatgcctttatgtcttatctgacatcgtttgaacaagtggctaatcttaaagttattagcgcatatcacgataatattaataacgatcaagggctgacctattttatcggactcagtgaaactgatgccggtgaatattattggcgcagtgtcgatcacagtaaattcaacgacggtaaattcgcggctaatgcctggagtgaatggcataaaattgattgtccaattaacccttataaaagcactatccgtccagtgatatataaatcccgcctgtatctgctctggttggaacaaaaggagatcaccaaacagacaggaaatagtaaagatggctatcaaactgaaacggattatcgttatgaactaaaattggcgcatatccgctatgatggcacttggaatacgccaatcacctttgatgtcaataaaaaaatatccgagctaaaactggaaaaaaatagagcgcccggactctattgtgccggttatcaaggtgaagatacgttgctggtgatgttttataaccaacaagacacactagatagttataaaaacgcttcaatgcaaggactatatatctttgctgatatggcatccaaagatatgaccccagaacagagcaatgtttatcgggataatagctatcaacaatttgataccaataatgtcagaagagtgaataaccgctatgcagaggattatgagattccttcctcggtaagtagccgtaaagactatggttggggagattattacctcagcatggtatataacggagatattccaactatcaattacaaagccgcatcaagtgatttaaaaatctatatctcaccaaaattaagaattattcataatggatatgaaggacagaagcgcaatcaatgcaatctgatgaataaatatggcaaactaggtgataaatttattgtttatactagcttgggggtcaatccaaataactcgtcaaataagctcatgttttaccccgtctatcaatatagcggaaacaccagtggactcaatcaagggagactactattccaccgtgacaccacttatccatctaaagtagaagcttggattcctggagcaaaacgttctctaaccaaccaaaatgccgccattggtgatgattatgctacagactctctgaataaaccggatgatcttaagcaatatatctttatgactgacagtaaagggactgctactgatgtctcaggcccagtagagattaatactgcaatttctccagcaaaagttcagataatagtcaaagcgggtggcaaggagcaaacttttaccgcagataaagatgtctccattcagccatcacctagctttgatgaaatgaattatcaatttaatgcccttgaaatagacggttctggtctgaattttattaacaactcagccagtattgatgttacttttaccgcatttgcggaggatggccgcaaactgggttatgaaagtttcagtattcctgttaccctcaaggtaagtaccgataatgccctgaccctgcaccataatgaaaatggtgcgcaatatatgcaatggcaatcctatcgtacccgcctgaatactctatttgcccgccagttggttgcacgcgccaccaccggaatcgatacaattctgagtatggaaactcagaatattcaggaaccgcagttaggcaaaggtttctatgctacgttcgtgatacctccctataacctatcaactcatggtgatgaacgttggtttaagctttatatcaaacatgttgttgataataattcacatattatctattcaggccagctaacagatacaaatataaacatcacattatttattcctcttgatgatgtcccattgaatcaagattatcacgccaaggtttatatgaccttcaagaaatcaccatcagatggtacctggtggggccctcactttgttagagatgataaaggaatagtaacaataaaccctaaatccattttgacccattttgagagcgtcaatgtcctgaataatattagtagcgaaccaatggatttcagcggcgctaacagcctctatttctgggaactgttctactataccccgatgctggttgctcaacgtttgctgcatgaacagaacttcgatgaagccaaccgttggctgaaatatgtctggagtccatccggttatattgtccacggccagattcagaactaccagtggaacgtccgcccgttactggaagacaccagttggaacagtgatcctttggattccgtcgatcctgacgcggtagcacagcacgatccaatgcactacaaagtttcaacttttatgcgtaccttggatctattgatagcacgcggcgaccatgcttatcgccaactggaacgagatacactcaacgaagcgaagatgtggtatatgcaagcgctgcatctattaggtgacaaaccttatctaccgctgagtacgacatggagtgatccacgactagacagagccgcggatatcactacccaaaatgctcacgacagcgcaatagtcgctctgcggcagaatatacctacaccggcacctttatcattgcgcagcgctaataccctgactgatctcttcctgccgcaaatcaatgaagtgatgatgaattactggcagacattagctcagagagtatacaatctgcgtcataacctctctatcgacggccagccgttatatctgccaatctatgccacaccggccgatccgaaagcgttactcagcgccgccgttgccacttctcaaggtggaggcaagctaccggaatcatttatgtccctgtggcgtttcccgcacatgctggaaaatgcgcgcggcatggttagccagctcacccagttcggctccacgttacaaaatattatcgaacgtcaggacgcggaagcgctcaatgcgttattacaaaatcaggccgccgagctgatattgactaacctgagcattcaggacaaaaccattgaagaattggatgccgagaaaacggtgttggaaaaatccaaagcgggagcacaatcgcgctttgatagctacggcaaactgtacgatgagaatatcaacgccggtgaaaaccaagccatgacgctacgagcgtccgccgccgggcttaccacggcagttcaggcatcccgtctggccggtgcggcggctgatctggtgcctaacatcttcggctttgccggtggcggcagccgttggggggctatcgctgaggcgacaggttatgtgatggaattctccgcgaatgttatgaacaccgaagcggataaaattagccaatctgaaacctaccgtcgtcgccgtcaggagtgggagatccagcggaataatgccgaagcggaattgaagcaaatcgatgctcagctcaaatcactcgctgtacgccgcgaagccgccgtattgcagaaaaccagtctgaaaacccaacaagaacagacccaatctcaattggccttcctgcaacgtaagttcagcaatcaggcgttatacaactggctgcgtggtcgactggcggcgatttacttccagttctacgatttggccgtcgcgcgttgcctgatggcagaacaagcttaccgttgggaactcaatgatgactctgcccgcttcattaaaccgggcgcctggcagggaacctatgccggtctgcttgcaggtgaaaccttgatgctgagtctggcacaaatggaagacgctcatctgaaacgcgataaacgcgcattagaggttgaacgcacagtatcgctggccgaagtttatgcaggattaccaaaagataacggtccattttccctggctcaggaaattgacaagctggtgagtcaaggttcaggcagtgccggcagtggtaataataatttggcgttcggcgccggcacggacactaaaacctctttgcaggcatcagtttcattcgctgatttgaaaattcgtgaagattacccggcatcgcttggcaaaattcgacgtatcaaacagatcagcgtcactttgcccgcgctactgggaccgtatcaggatgtacaggcaatattgtcttacggcgataaagccggattagctaacggctgtgaagcgctggcagtttctcacggtatgaatgacagcggccaattccagctcgatttcaacgatggcaaattcctgccattcgaaggcatcgccattgatcaaggcacgctgacactgagcttcccaaatgcatctatgccggagaaaggtaaacaagccactatgttaaaaaccctgaacgatatcattttgcatattcgctacaccattaaataa

SEQ ID NO: 65 - DNA, 7500 bp, Photorhabdus luminescens
atgaacacactcaaatccgaatatcaacaagcgttaggagcaggttttaataatctaaccgatatctgccatctctcttttgacgaactgcgcaaaaaagtgaaggataaactctcatggtcacagacccagagcttatatcttgaagcacagcaggtgcaaaaggataaccttctgcatgaagcccgtattctgaaacgcgcaaaccctcatttacaaagtgcggtccatcttgccctgacagcacctcatgcagaccagcaaggttataatagccgatttggcaatcgcgccagcaaatatgcagcccctggcgcaatttcctccatgttttctcttgcggcttatctgactgaactttatcgtcaggcacgaaatttacatgcagaaggttccatttatcatctggatacgcgtcgcccagatctaaaatcattggtgctcagccagaaaaatatgaatacggagatttccacgctttctctgtctaataacatgttgctaaacagtattaagactcagcctaatctgaacagccacgctaaagtgatggaaaagttatcaactttccgcacttctggctcaatgccatatcacgatgcttatgaaagtgtacgtaagattattcaattacaagctcctgtgtttgaacaatccagtacattaacagatacgccaatcaccaaactgatgtatcaaatctccttgctggggattaatgcctctgtctcaccggagctgtttactattctgacgcaaaagataaaaccagcaaccaatgctgataacactaatgaactaaaaaaactttataagaagaattttggtgaaattaaatctattcaaatggcaagggcagaatacctgaaaagttattataatctgacagacaaagaacttaaccagtttagtaaaaagattaaacaaatagatagcctgtggaatataggagacgagattacccaataccatctattgaaattcaataaagctattaatctatctcgatcaaccgagctatcaccaataatccttaacagcattgccatcgatatccttaaaaaaacacctccagaggatgactctgacaacccttttagggacgaccctgattaccttgaaagctttcaagaccttgaccttagtgacgaaccagatatagacgaagatgtattaagagaagctttacgtgttaaagactatatgcaacgttatggtattgatgctgagactgcattaatactgtgcaaagcacccatttcagaaaatccttctcatcccgatctatccaaattactagcagacatccatcaattaactattgatgaattaggggtactactggttgccatagatgaaggaaaaaccgatttatctcagattactcatgacaatttagcggttctaattagcaaactctattccgttaccaattggctgcgtacacggaaatggagtgtatatcagttatttgtaatgacgaccgataaatataacaaaaccttaaccccggaaataaacaaccttctggataccgtctacaatggcttgcagaacttttacaaggataatttgctaaaaataaaagataatctattgaaagccaaagaaagtttaccagaagacaaagataatdtgccgaaagcmgagcaakatstgttggaagccgagaaatatctgctagcagccgagaaatatctgctagcagccgagaaatatctattggaagccaataaaaatccgctagaagccaaaaaggctctgaaagaatacgagaaaaatcaggaggcatacgagaaaaatctgaaagaacacgagaaatatctgttgaaagccggagaaaatctgccagcaatcaaagagaatttgctaaaaatcaaggaaaatctgccaaaagccatatctccttatatcgccgccgctctgcaattgccatctgagaatgttgctctctccgtgctggcttgggcagataaactaaactctggcaaagaaaacaaaatgacggcagattcattctggaactggttacggaaaaaacccattgaaactcaatcgaaaacaactgaagcaactgaagcaactgaagcaactgaagcaactgaagcaactgaagcaactgaaaaaactacactaattcaacaagctgtccaatattgccagtgcctagcacaactggcgctgatttatcgctctaccggtcttagcgaaagcactttacgtctgtttgtgacaaatccacaaatctttggtcttaccgcgaaaacaacgtcaacacacaatgtattatcactgattatgctgacgcgttttactgactgggttaactcactaggtgaaaacgcctcttctgtactgaccgagtttgaaaaaggaacattaacggcagaactattggctaacgccatgaatcttgataaaaatctactagagcaagccagtactcaagcacaagctgatttctccaattggccatctatcgacaacctattgcagtggattaacatctcgcgtcaattgaacatctcgccacaaggcgtttctgaactggcgaaaatattagacatagaatcttctactaattatgcccaatgggaaaatgtcgcttcaatattaaccgccggactagatacccaaaaagccaataccctacatgcatttctgggtgagtctcgcagtactgcgttaagtacatactatatttattctcataaccaaaaagatcgagaagaaagaaaacatacggtaattaaagaccgtgatgatctatatcaatacctgttgatcgataaccaagtctccgccgccatcaaaaccacggagattgctgaagctatcgctagtatccaactgtatattaaccgcgcattgaaaaatatggagggagataccgacacaagtgtcactagccgtttattcttcactaactgggataaatacaacaaacgctacagcacctgggctggtattactaagctcctttactaccctgaaaactatatcgatccgacactgcggatcggccagacaaaaatgatggatacgctactgcaatccatcagccaaagtcaattgaataccgataccgtagaagatgcctttaaatcttatctaacgtcattcgaacaagtggctaatctggaagtcatcagcgcctatcatgacaatattaataatgaccaaggattgacctattttatcggacgcagtaaaacagaagtgaatcaatattattggcgcagtgtagatcacaataaattcagcgaaggtaaattccccgctaatgcctggagcgagtggcacaaaattgactgcccaattaatccctacgaagatactatccgcccggtagtctaccaatcccgcctgtatattatctggctggaacagaagaaggtaactaatcgagcagaaggagaagctatcaaacaaggaagcaaaacgaccacaagctatcattatgaactgaaattggcacatattcgttatgacggcacctggaatacaccaattacctttgatgtagatgaaaaaatatctggtctaaatttagaactgaataaagcgttagggctctattgtgcaagttatcaaggcaaagataaattgctggttatgttttataaaaaacaggagcaattaaataattacacagaaaaaacaggaaacacatacacagcaccaataaaagggctatatatcacttccaatatgtctcctgaggaaatgacacccgaaagttacagacttaatgctcataaacagtttgataccaacaatgtcgtaagagtcaataaccgctatgcagaaagctacgaaatcccttcatcagtaaacagtaataatggttatgattggggagagggctatctgagtatggtatacggcgggagcattctgattacccgtgacccaagcgataactcaaaaatccaaatctcaccaaagttaagaattattcataatggatatgaaggtcgacaacgtaatcaatgcaatttgatgaagaaatacggcaagctcggtgataaattcattatttatactacgctaggtattaaccccaataatttatcaaataaaaaacttatctaccctgtttatcaatatgaaggaaatgaaagtaagcttagtcaaggaagacttctgttttatcgggatagcaccactaactttacaagagcctggttccctaacctttcttctgactcaaaagaaatgtccataaccactggcggtaacattagtggtaattatggttatattgataacaaacatagtgacaacaaaccattcgaagaatatttctatatggacgaccacggcggtattgacactgacgtttcggagccaatatttattaatacaaaaattcagccttcaaatgttaaaatcatagtgaaaacagtgaaggatgatggaaaattagacagtaaaccatatatagcagaagacaaagtttcagttaaaccgacaccaaactttgaagaaatgtgttatcagtttaataatctcgatcaaatagatgtctccactctagtatttaaaaataatgaagcaagtattgatatcacctttacagcatctgctgacgcatttgaaagtggtaaagaacaacgtaatctaggtgaagaacatttcagtattcgtattatcaaaaaagcgaatgttaatgatgtcctgacccttcaccacgatccaagtggggcacaatatatgcaatggggagcctatcgtactcgccttaataccctgtttgcccgtaaattaattagccgcgccaatgcggggatcgacactattttgagtatggaaactcagaatattcaagagccacaattaggcaaaggcttttatgttaatttcactcttcctaaatatgatcaaaacacacatggtaatgaacgccagtttaaaattcatatagggaatattgctggtgataatacaatgcggccatattaccaaggaatattggctgacaccgaaaccagtgtcgttctttttgtcccttatgagaaacaatcttataccaatgaaggtgttagattaggagttgaatacaaaaaagtatcttacctaggcgtctgggaacccgctttcttctatttcaatgaaattcaacagaagtttattctgattaatgatgccgatcataactcagcaatgactcaatctggtgaaaaaacaggaattaaaaaatacaaaggctttcttgacgtttctattcttatcgatcatcagcacacagaaccaatggacttcaacggcgccaacagcctctacttctgggaactgttctactataccccgatgctgatcgctcaacgtttgctacacgagcaaaatttcgatgaagctaaccgttggctgaaatatgtctggaatccatctggtcatattgccaatggtcaaaaacagcacccccacaactggaatgtccgcccattacaagaggacaccagttggaacgatgatccattggatacatttgatcccgatgccatcgctcaacatgatccgatgcactacaaagtcgccacctttatgtgcgcccttgatctattgatcgaacagggagattacgcctatcgccagttggaacgggacacactcgccgaagccaaaatgtggtatatgcaggcactgcatctattaggcgataaacctcatttattactcagttcaacatggagtgatccagagctaaaagaagccgcagatcttgaaaaacaacaggcacatgccaaagcaatagcagatttacgacaaggccagcctaaagatggaagcaacacagatcttttcctgccacaggtcaacgaagtgatgttgagctattggcagaaactggaacaacggttatataacctgcgccataacctctctattgatggtcaacctttacatttgcctattttcgcgacaccggcagatccaaaagcgctgctcagcgccgctgtcgccagttcacaaggtggaagcaatcttccgtcagagtttatatcagtttggcgtttcccacatatgctggaaaacgcccgcagtatggtcagtcaactcacccaattcggctccacattacaaaatattatcgaacgtcaggatgcggaagcattaaacacgctgttacagaatcaagcggcggaactgatattgaccaatctcagcatacaggacaaaaccattgaagagctggatgttgaaaaaactgtgctagaaaaaacccgcgccggagctaaatcgcgttttgatagctacagcaaattctacgatgaagatatcaacgcaggtgaaaaacaggcgatggcgttgcgagcctccgtcgcaggcatctctactgcacttcaagcatcacatctggcaggcgcagcgcttgatttggctcccaacatctttggcttcgctgatggcggtagccattggggagcaattgcccaagccacaagtaatgtcatggaattctccgccagtgtcatgagcaccgaagcggataaaatcagccagtctgaagcctaccgtcggcgtcgacaggagtggaaaatccagcgtaacaacgctgatgcagagttgaaacaaatcgatgctcaacttcaatcattagtcgtacgccgtgaagccgccgtgttgcagaaaaccagcctgaaaacccaacaagagcagacgcacgcacaactgaccttcctgcaacataagttcagcaatcaggcattatacaactggctgcgtggtcggctgtccgccatttacttccagttctatgatttagcggtagcccgttgcctgatggctgaaatggcctatcgttgggagactaacgatgccgcagcacgctttatcaagcccggcgcctggcagggaacccatgccggtctgctggcgggtgaaaccttaatgctgaatctagcacagatggaagatgcccacctgaaacaggagcaacgcgtactggaggtagaacgtaccgtttcactagcagaagtttataaagagaaaggtcaattttctctgaccaagaaaattgcagaactggtgaataagaaaccagacactaccagtagcagaaataacacactgaattttggtgaaggaaatgccaaaacttctctacaagcgtctatttcgttagctgacttacaaattcgtcacgattacccagaaaacagtggagccggtaacgtccgccggattaaacagatcagtgtcaccctgccggcactgttaggaccttatcaggatgtgcaagcgattctgtcttatggcggagatgccaccgggttagccaaaggttgtaaagcgctggcagtttctcacggaatgaatgacagcggtcagttccaattggatttcaacgatggcaaattcctgccatttgaaggaatcgaaatcgataaaggtacgctgacattaagcttcccgaatgcaaccgaaaaacaaaaaaccatgctggagagtataagcgacatcattctgcatattcgctacaccattcgccaataa

SEQ ID NO: 66 - DNA, 7146 bp, Photorhabdus luminescens
atgaactcatacgtgaaagagatacctgatgtattacaaagccaatatggtattaattgtctgacagatatttgccactattcttttaatgaatttcgtcagcaagtctctgatcatctctcctggtcagagaccaaccgcttatatcgtgatgcacaacaggaacaaaaagagaatcaattatatgaagctcgtattcttaaacgcgctaacccgcagttgcaaaatgcagtgcacctcggtattaccctccctcatgctgaattacgaggctataatagtgaattcggtggccgagccagccaatatgtggcgccgggttcggtttcctctatgttctcccccgcagcttatttaactgaactctatcgtgaagcacgtaatttacatgccagcgactccgtttatcatctggatgaacgccgcccagacctccaatcaatgacgctcagccagcaaaatatggataccgaactttccactctttctctgtctaatgaaattttgttgaaaggaattaaagctaatcagtctaatctggacagcgatactaaggtgatggaaatgttatccactttccgtccttccggcacgataccttatcatgatgcttacgaaaatgtacgtaaagctatccaattacaagatccgaaacttgaacaatttcagaaatcaccggcggtcgccggattaatgcatcaagcttcattattaggaattaataactctatctcaccagaactgtttaatattctgacagaagagattaccgaagctaacgcagaggcaatttataaacagaattttggcgatattgaccctgcctgcctggcaatgccggaatatctgaaaagttattataattttagtgatgaagaactcagtcaatttattcgcaaatatccagataatgaactaaatactcagaaaatacatttactaaaaatcaataaaattattttattatcgcaagccgtgaatctgccgtttttaaagttagatgaaattattccagaacagaacattaccccgacagtattagggaaaatctttctagttaaatattatatgcagaaatacaatattggtacggaaactgccttaatattatgtaatgattccatttcacaatactcctatagtaatcaacctagccaatttgatcgcctatttaatacctcgccactcaatggacaatatttcgttatcgaagacactaatattgacctaagtctgaacagtaccgataactggcacaaagcagtacttaaacgtgcttttaatgtcgatgatatttccctctatcgtttactccatattgccaatcataacaataccgatggaaaaattgctaataatataaaaaatctttccaatctttatatgactaaactactggcagatattcatcaattaacgattgatgaactgtatttactactgataactattggtgaagataaaataaatttatatgatattgatgataaagagctggagaaactcataaacagactcgataccctaagcaattggctgcatacacaaaagtggagtatctatcagttatttttgatgaccaccaccaactatgacaaaacactaacgcctgaaattcaaaacttactcgatacggtctacaatggcttacagaacttcgataaaaataaaaccaaacttctggcagccatcgcgccttatattgctgcaacactacaattaccatctgaaaatgtcgcacattctattcttctctgggctgataagataaaaccaagcgaaaataaaataacggcagaaaaattttggatctggttacaaaatagagatactacagaattgtcaaaaccgccagaaatgcaggaacaaattattcagtactgccactgtctggcacaattgacaatgatttatcgttcttccggcattaatgaaaacgctttccgtctatttatcgaaaagccaactatttttggcatccctgatgaaccgaataaagcgacaccagcccataatgcaccaacattaatcatcctaacccgctttgccaattgggttaattctctaggtgaaaaagcctcccctattctaacggcttttgaaaataaaaccttaactgcggaaaaattagctaacgccatgaatcttgatgctaatttactggaacaagccagtattcaagcacaaaattataagcaggttactaaagaaaatacattctccaattggcaatccatcgacattattctgcaatggactaatatagccagtaatttaaatatctccccacaaggtatttcccctctaatagcattggattatataaaaccggctcaaaaaacaccgacttatgcccaatgggaaaatgcagctatagcattaactgccgggttagacactcaacaaactcatactctacacgtatttctggacgaatctcgcagtaccgcattaagcaactattatattggcaaggttgctaatcgggcagcatcaattaaaagccgtgacgatttataccaatacttactgattgataatcaagtttccgctgaaataaaaactacacgtattgccgaagccattgccagtatccaattgtatgtcaaccgagcgctggaaaatatagaaatccatgccgtttctgatgttattacccgtcaattttttatcgattgggataaatataataaacgttacagtacttgggctggcgtttcacaattagtttactatcccgaaaattatatcgacccgacgatgcgtatcggacaaacgaaaatgatggatacgttattgcaatccgtcagccagagccaattaaatgccgatacggtagaagatgcatttaaatcttacctgacctcgtttgaacaagtcgctaatttggaagtcattagtgcttatcatgataacgttaataatgaccaaggactgacctattttatcgggaacagcaaaacagaagttaatcaatattactggcgcagcgtcgatcacagtaaattcaacgacggtaaattcgctgctaatgcctggagtgaatggcacaaaattgactgcgcaattaatccctaccaaagcaccattcgcccagttatctataaatcccgattatatctgatttggctggaacaaaaagaaacagctaaacaaaaggaggataataaagtcactacagactatcactatgaattaaaattggctcatattcgttatgatggtacctggaatgtgccaatcacctttgatgtagatgaaaaaatactagctttagaactgacaaaatctcaagcacctggactctattgcgcaggttatcaaggggaagatacactattaatcatgttttatagaaaaaaagagaaattggatgattataaaactgcaccaatgcaaggattttatattttctccgatatgtcttccaaagatatgaccaatgaacaatgcaattcttatcgagataacggttatacacatttcgatactaattctgatactaatagcgtcataagaataaataatcgctatgcagaggattatgaaattccttcattgatcaatcatagcaatagccatgattggggggaatataatcttagccaggtatatggcggaaatatagttatcaattacaaagttacatcaaatgatttgaaaatctatatttcaccaaaattaagaataatccatgatggaaaagaaggtcgagagcgcattcagtctaatctaataaagaaatacggcaaattgggtgataaattcattatttatactagtttgggaatcaatccgaataattcatcaaatagattcatgttttacccagtctatcaatataatggaaacactagcggccttgctcaagggagactattattccatcgagacacgagttattcatctaaagtagcggcttggattcctggggcaggacgttctttaatcaatgaaaatgctaacatcggtgatgattgtgctgaagattctgtgaataaaccggatgatcttaagcaatacatctatatgactgacagtaaagggactgctactgatgtttccgggccagtagatatcaacacagcaatttcttctgaaaaggttcaaatcacaattaaagctggcaaagaatactctcttacagcgaataaagatgtctccgttcagccatcacctagctttgaagaaatgtgttaccaatttaatgctctcgaaatagatggctctaatctgaattttactaacaattcagccagtattgatgtcacttttaccgcactggcagatgatggacgcaaattgggttatgaaattttcaatatccctgttattcaaaaggttaaaaccgataatgctctaactctttttcatgacgagaatggcgctcaatatatgcaatggggagcctatcgcattcgccttaatacgctatttgctcgccaattagttgaacgagctaatactggtattgatacaattctaagtatggaaactcagaatattcaggaaccgatgatgggaataggcgcttatatagaactcattttggataaatataatcctgatatccacggcactaataaatcatttaagattatatatggtgatatttttaaagcaggtgatcattttcctatttatcagggagcattaagcgatattacacaaacaacagtaaaattattcttacctcgcgttgataacgcttatggaaataaaaacaatctctatgtttacgcggcctatcaaaaagtggaaacaaatttcattcgattcgttaaagaggataataataaacccgctacattcgacactacctataagaatgggaccttcccagggcttgcatcagccagagtaatacaaactgtctcggaaccaatggatttcagcggcgctaatagtctctacttctgggaactgttctactataccccgatgatggttgctcaacgtttgctacatgaacaaaactttgatgaagccaaccgttggctaaaatatgtctggagcccatccggttatattgttcgaggtcaaattaaaaactaccactggaatgtgcgcccattactggaaaacaccagttggaacagtgatcctttggattccgtcgatcctgacgcagtggcacagcacgatccaatgcactataaagtagccacctttatgcgtactctcgatctactgatggcacgcggcgatcacgcctatcgccaacttgagcgggatacgctgaacgaagccaaaatgtggtatatgcaagcactgcacctgttgggcaataaaccctatctgcctctgagttctgtatggaatgatccacgtctggacaatgccgcagccactaccacacaaaaagcacacgcctacgcaataacctctctacggcaaggcacgcaaacaccagcattattattgcgctccgctaataccctgaccgatcttttcctgccacaaatcaacgacgttatgttgagctactggaacaaactggaactgcgtctgtataacttacgtcataatctctctatcgatggtcagcctctccacctaccgatttacgccacaccggccgatccgaaagcgttactcagcgccgccgttgctacttctcaaggcggcggcaaactaccagagtcatttatatcactgtggcgcttcccgcatatgttggaaaatgcccgtagtatggtcactcagctaatacagttcggctccacgttgcaaaatattattgaacgccaagatgctgaatccttaaatgctctgctgcaaaatcaagccaaagagttgattttgacaacgctcagcattcaagacaaaaccatcgaagaaatagatgctgaaaaaactgtgctggaaaaatccaaagccggagcaaaatcgcgctttgacaactacagcaaattatatgacgaagatgtcaacgccggtgagcgtcaagctctggatatgcgaatagcttcccaaagtattacctcaggattgaaaggcttgcacatggctgccgccgcactggagatggtgcccaatatctacggctttgcagtcggggggacgcgctatggagcaattgccaatgccattgcgattggtggcggtatcgccgcagaaggtttgttaattgaagcagagaaagtctcgcaatctgaaatatggcgccgtcgccgtcaagagtgggaaatccagcgtaataatgccgaagcagagatgaaacaaatcgatgctcaacttaaatcactaacggtacgccgtgaagcggcggtattacagaaaaccggcctaaaaacccaacaggaacaaactcaagcgcaactagctttcctgcaacgaaaattcagcaatcaagcgctgtataattggttacgtggtcggttagcagccatttatttccaattttacgatttagtcgtcgcccgttgtttgatggcagaacaagcttaccgttgggaaactaatgatagctctgcacgctttattaaaccgggagcctggcagggaacctatgccggcctgctcgccggagaaaccctaatgttgaacctggcgcaaatggaagacgcgcacctgaaacaagagcaacgcgcactggaagtggaacgcacggtttctctggcgcaggtgtaccaatccttaggggagaaaagctttgcattaaaagataaaattgaagcgttgctacaaggagataaagagacttccgccggtaacgacggcaatcaattgaaattaaccaacaatacgctatccgcgacgctaaccctgcaagatctgaaactcaaagatgactacccggaagagatgcagttaggtaaaacacgccgcattaaacaaattagcgtctccttaccggcattattgggaccgtatcaagatgttcaggctgtcctgtcttatggtggcgatgccaccgggctagctaaaggttgtaaagccttggcggtctcccacggcctgaatgacaacggtcagtttcagctcgattttaacgatggcaaattcctgccgtttgaagggatcgatattaatgacaaagggacattcacgctaagtttccccaatgccgccagtaaacaaaaaaatatattacagatgctgaccgatattattctgcacattcgttacactattctcgaataa

SEQ ID NO: 67 - DNA, 15067 bp, Artificial Sequence
  8836 "BCA" triple fusion polynucleotide sequence
tctagactgagtcgacgcactactagtaacaaagaaggagatataccatgcaaaattcacaagattttagtattacggaactgtcactgcccaaaggggggggcgctatcacgggaatgggtgaagcattaacccccactggaccggatggtatggccgcgctatctctaccattgcctatttctgccgggcgcggttatgctcccgcattcactctgaattacaacagcggcgccggtaacagtccatttggtctgggttgggattgcaacgttatgactatccgccgccgcacccattttggcgtcccccattatgacgaaaccgatacctttttggggccagaaggcgaagtgctggtggtagcggatcaacctcgcgacgaatccacattacagggtatcaatttaggcgccacctttaccgttaccggctaccgttcccgtctggaaagccatttcagccgattggaatattggcaacccaaaacaacaggtaaaacagatttttggttgatatatagcccagatgggcaggtgcatctactgggtaaatcaccgcaagcgcggatcagcaacccatcccaaacgacacaaacagcacaatggctgctggaagcctctgtatcatcacgtggcgaacaaatttattatcaatatcgcgccgaagatgacacaggttgcgaagcagatgaaattacgcaccatttacaggctacagcgcaacgttatttacacatcgtgtattacggcaaccgtacagccagcgaaacattacccggtctggatggcagcgccccatcacaagcagactggttgttctatctggtatttgattacggcgaacgcagtaacaacctgaaaacgccaccagcattttcgactacaggtagctggctttgccgtcaggaccgtttttcccgttatgaatatggctttgagattcgtacccgccgcttatgccgtcaggtattgatgtaccatcacctgcaagcactggatagtaagataacagaacacaacggaccaacgctggtttcacgcctgatactcaattacgacgaaagcgcgatagccagcacgctagtattcgttcgccgagtgggacacgagcaagatggtaatgtcgtcaccctgccgccattagaattggcatatcaggatttttcaccgcgacatcacgctcactggcaaccaatggatgtactggcaaacttcaatgccattcagcgctggcagctagtcgatctaaaaggcgaaggattacccggcctgttatatcaggataaaggcgcttggtggtaccgctccgcacagcgtctgggcgaaattggctcagatgccgtcacttgggaaaagatgcaacctttatcggttattccttctttgcaaagtaatgcctcgttggtggatatcaatggagacggccaacttgactgggttatcaccggaccgggattacggggatatcatagtcaacgcccggatggcagttggacacgttttaccccactcaacgctctgccggtggaatacacccatccacgcgcgcaactcgcagatttaatgggagccgggctatccgatttggtgctgatcggccctaagagcgtgcgtttatatgccaatacccgcgacggctttgccaaaggaaaagatgtggtgcaatccggtgatatcacactgccggtgccgggcgccgatccacgtaagttggtggcgtttagtgatgtattgggttcaggtcaagcccatctggttgaagtaagcgcgactaaagtcacctgctggcctaatctggggcgcggacgttttggtcaacccattaccttaccgggattcagccagccagcaaccgagtttaacccggctcaagtttatctggccgatctggatggcagcggtccaacggatctgatttatgttcatacaaaccgtctggatatcttcctgaacaaaagtggcaatggctttgctgaaccagtgacattacgcttcccggaaggtctgcgttttgatcatacctgtcagttacaaatggccgatgtacaaggattaggcgtcgccagcctgatactgagcgtgccgcatatgtctccccatcactggcgctgcgatctgaccaacatgaagccgtggttactcaatgaaatgaacaacaatatgggggtccatcacaccttgcgttaccgcagttcctcccaattctggctggatgaaaaagccgcggcgctgactaccggacaaacaccggtttgctatctccccttcccgatccacaccctatggcaaacggaaacagaagatgaaatcagcggcaacaaattagtcacaacacttcgttatgctcgtggcgcatgggacggacgcgagcgggaatttcgcggatttggttatgtagagcagacagacagccatcaactggctcaaggcaacgcgccagaacgtacgccaccggcgctgaccaaaaactggtatgccaccggactgccggtgatagataacgcattatcaaccgagtattggcgtgatgatcaggcttttgccggtttctcaccgcgctttacgacttggcaagataacaaagatgtcccgttaacaccggaagatgataacagtcgttactggttcaaccgcgcgttgaaaggtcaactgctacgtagtgaactgtacggattggacgatagtacaaataaacacgttccctatactgtcactgaatttcgttcacaggtacgtcgattacagcataccgacagccgataccctgtactttggtcatctgtagttgaaagccgcaactatcactacgaacgtatcgccagcgacccgcaatgcagtcaaaatattacgctatccagtgatcgatttggtcagccgctaaaacagctttcggtacagtacccgcgccgccagcagccagcaatcaatctgtatcctgatacattgcctgataagttgttagccaacagctatgatgaccaacaacgccaattacggctcacctatcaacaatccagttggcatcacctgaccaacaataccgttcgagtattgggattaccggatagtacccgcagtgatatctttacttatggcgctgaaaatgtgcctgctggtggtttaaatctggaacttctgagtgataaaaatagcctgatcgcggacgataaaccacgtgaatacctcggtcagcaaaaaaccgcttataccgatggacaaaatacaacgccgttgcaaacaccaacacggcaagccctgattgcctttaccgaaacaacggtattcaaccagtccacattatcagcgtttaacggaagcatcccgtccgataaattatcaacgacgctggagcaagctggatatcagcaaacaaattatctattccctcgcactggagaagataaagtttgggtagcccatcacggctataccgattatggtacagcggcacagttctggcgcccgcaaaaacagagcaacacccaactcaccggtaaaatcaccctcatctgggatgcaaactattgcgttgtggtacaaacccgggatgctgctggactgacaacctcagccaaatatgactggcgttttctgaccccggtgcaactcaccgatatcaatgacaatcagcaccttatcacactggatgcattgggccgaccaatcacattgcgcttttggggaactgaaaacggcaagatgacaggttattcctcaccggaaaaagcatcattttctccaccatccgatgttaatgccgctattgagttaaaaaaaccgctccctgtagcacagtgtcaggtctacgcaccagaaagctggatgccagtattaagtcagaaaaccttcaatcgactggcagaacaagattggcaaaagttatataacgcccgaatcatcaccgaagatggacgtatctgcacactggcttatcgccgctgggtacaaagccaaaaggcaatccctcaactcattagcctgttaaacaacggaccccgtttacctcctcacagcctgacattgacgacggatcgttatgatcacgatcctgagcaacagatccgtcaacaggtggtattcagtgatggctttggccgcttgctgcaagccgctgcccgacatgaggcaggcatggcccggcaacgcaatgaagacggctctttgattataaatgtccagcatactgagaaccgttgggcagtgactggacgaacggaatatgacaataaggggcaaccgatacgtacctatcagccctatttcctcaatgactggcgatacgtcagcaatgatagtgcccggcaggaaaaagaagcttatgcagatacccatgtctatgatcccataggtcgagaaatcaaggttatcaccgcaaaaggttggttccgtcgaaccttgttcactccctggtttactgtcaatgaagatgaaaatgacacagccgctgaggtgaagaaggtaaagatgccgggatccgacaacaagggtcagactatccgcactaggcctatgaaaaacatcgatcccaaactttatcaaaaaacccctactgtcagcgtttacgataaccgtggtctgataatccgtaacatcgattttcatcgtactaccgcaaatggtgatcccgatacccgtattacccgccatcaatacgatattcacggacacctaaatcaaagcatcgatccgcgcctatatgaagccaagcaaaccaacaatacgatcaaacccaattttctttggcagtatgatttgaccggtaatcccctatgtacagagagcattgatgcaggtcgcactgtcaccttgaatgatattgaaggccgtccgctactaacggtgactgcaacaggggttatacaaactcgacaatatgaaacttcttccctgcccggtcgtctgttatctgttgccgaacaaacacccgaggaaaaaacatcccgtatcaccgaacgcctgatttgggctggcaataccgaagcagagaaagaccataaccttgccggccagtgcgtgcgtcactatgacacggcgggagttacccggttagagagtttatcactgaccggtactgttttatctcaatccagccaactattgatcgacactcaagaggcaaactggacaggtgataacgaaaccgtctggcaaaacatgctggctgatgacatctacacaaccctgagcaccttcgatgccaccggtgctttactgactcagaccgatgcgaaagggaacattcagagactggcttatgatgtggccgggcagctaaacgggagctggctaacactcaaaggccagacggaacaagtgattatcaaatccctgacctactccgccgccggacaaaaattacgtgaggaacacggcaatgatgttatcaccgaatacagttatgaaccggaaacccaacggctgatcggtatcaaaacccgccgtccgtcagacactaaagtgctacaagacctgcgctatgaatatgacccggtaggcaatgtcatcagcatccgtaatgacgcggaagccacccgcttttggcacaatcagaaagtgatgccggaaaacacttatacctacgattccctgtatcagcttatcagcgccaccgggcgcgaaatggcgaatataggtcaacaaagtcaccaatttccctcacccgctctaccttctgataacaacacctataccaactatacccgtacttatacttatgaccgtggcggcaatctgaccaaaatccagcacagttcaccggcgacgcaaaacaactacaccaccaatatcacggtttcaaatcgcagcaaccgcgcagtactcagcacattgaccgaagatccggcgcaagtagatgctttgtttgatgcaggcggacatcagaacaccttgatatcaggacaaaacctgaactggaatactcgtggtgaactgcaacaagtaacactggttaaacgggacaagggcgccaatgatgatcgggaatggtatcgttatagcggtgacggaagaaggatgttaaaaatcaatgaacagcaggccagcaacaacgctcaaacacaacgtgtgacttatttgccgaacttagaacttcgtctaacacaaaacagcacggccacaaccgaagatttgcaagttatcaccgtaggcgaagcgggccgggcacaggtacgagtattacattgggagagcggtaaaccggaagatatcgacaataatcagttgcgttatagttacgataatcttatcggttccagtcaacttgaattagatagcgaaggacaaattatcagtgaagaagaatattatccctatggtggaacagcattatgggccgccaggaatcagacagaagccagttataaaactatccgttattcaggcaaagagcgggatgccaccgggctatattactacggctatcggtattaccaaccgtggataggacggtggttaagctccgatccggcaggaacaatcgatgggctgaatttatatcggatggtgaggaataatccagttaccctccttgatcctgatggattaatgccaacaattgcagaacgcatagcagcactaaaaaaaaataaagtaacagactcagcgccttcgccagcaaatgccacaaacgtagcgataaacatccgcccgcctgtagcaccaaaacctagcttaccgaaagcatcaacgagtagccaaccaaccacacaccctatcggagctgcaaacataaaaccaacgacgtctgggtcatctattgttgctccattgagtccagtaggaaataaatctacttctgaaatctctctgccagaaagcgctcaaagcagttcttcaagcactacctcgacaaatctacagaaaaaatcatttactttatatagagcagataacagatcctttgaagaaatgcaaagtaaattccctgaaggatttaaagcctggactcctctagtcactaagatggcaaggcaatttgctagtatctttattggtcagaaagatacatctaatttacctaaagaaacagtcaagaacataagcacatggggagcaaagccaaaactaaaagatctctcaaattacataaaatataccaaggacaaatctacagtatgggtttctactgcaattaatactgaagcaggtggacaaagctcaggggctccactccataaaattgatatggatctctacgagtttgccattgatggacaaaaactaaatccactaccggagggtagaactaaaaacatggtaccttcccttttactcgacaccccacaaatagagacatcatccatcattgcacttaatcatggaccggtaaatgatgcagaaatttcatttctgacaacaattccgcttaaaaatgtaaaacctcataagagacctagggataataaaggccaaaccattcgtacccgtccagaattcatgtatagcacggctgtattactcaataaaatcagtcccactcgcgacggtcagacgatgactcttgcggatctgcaatatttatccttcagtgaactgagaaaaatctttgatgaccagctcagttggggagaggctcgccatctctatcatgaaactatagagcagaaaaaaaataatcgcttgctggaagcgcgtatttttacccgtgccaacccacaattatccggtgctatccgactcggtattgaacgagacagcgtttcacgcagttatgatgaaatgtttggtgcccgttcttcttcctttgtgaaaccgggttcagtggcttccatgttttcaccggctggctatctcaccgaattgtatcgtgaagcgaaggacttacatttttcaagctctgcttatcatcttgataatcgccgtccggatctggctgatctgactctgagccagagtaatatggatacagaaatttccaccctgacactgtctaacgaactgttgctggagcatattacccgcaagaccggaggtgattcggacgcattgatggagagcctgtcaacttaccgtcaggccattgataccccttaccatcagccttacgagactatccgtcaggtcattatgacccatgacagtacactgtcagcgctgtcccgtaatcctgaggtgatggggcaggcggaaggggcttcattactggcgattctggccaatatttctccggagctttataacattttgaccgaagagattacggaaaagaacgctgatgctttatttgcgcaaaacttcagtgaaaatatcacgcccgaaaatttcgcgtcacaatcatggatagccaagtattatggtcttgaactttctgaggtgcaaaaatacctcgggatgttgcagaatggctattctgacagcacctctgcttatgtggataatatctcaacgggtttagtggtcaataatgaaagtaaactcgaagcttacaaaataacacgtgtaaaaacagatgattatgataaaaatataaattactttgatttgatgtatgaaggaaataatcagttctttatacgtgctaattttaaggtatcaagagaatttggggctactcttagaaaaaacgcagggccaagtggcattgtcggcagcctttccggtcctctaatagccaatacgaattttaaaagtaattatctaagtaacatatctgattctgaatacaaaaacggtgtaaagatatacgcctatcgctatacgtcttccaccagcgccacaaatcagggcggcggaatattcacttttgagtcttatcccctgactatatttgcgctcaaactgaataaagccattcgcttgtgcctgactagcgggctttcaccgaatgaactgcaaactatcgtacgcagtgacaatgcacaaggcatcatcaacgactccgttctgaccaaagttttctatactctgttctacagtcaccgttatgcactgagctttgatgatgcacaggtactgaacggatcggtcattaatcaatatgccgacgatgacagtgtcagtcattttaaccgtctctttaatacaccgccgctgaaagggaaaatctttgaagccgacggcaacacggtcagcattgatccggatgaagagcaatctacctttgcccgttcagccctgatgcgtggtctgggggtcaacagtggtgaactgtatcagttaggcaaactggcgggtgtgctggacgcccaaaataccatcacactttctgtcttcgttatctcttcactgtatcgcctcacgttactggcccgtgtccatcagctgacggtcaatgaactgtgtatgctttatggtctttcgccgttcaatggcaaaacaacggcttctttgtcttccggggagttgccacggctggttatctggctgtatcaggtgacgcagtggctgactgaggcggaaatcaccactgaagcgatctggttattatgtacgccagagtttagcgggaatatttcaccggaaatcagtaatctgctcaataacctccgaccgagtattagtgaagatatggcacagagtcacaatcgggagctgcaggctgaaattctcgcgccgtttattgctgcaacgctgcatctggcgtcaccggatatggcacggtatatcctgttgtggaccgataacctgcggccgggtggcttagatattgccgggtttatgacactggtattgaaagagtcgttaaatgccaatgaaaccacccaattggtacaattctgccatgtgatggcacagttatcgctttccgtacagacactgcgcctcagtgaagcggagctatccgtgctggtcatctccggattcgccgtgctgggggcaaaaaatcaacctgccggacagcacaatattgatacgctattctcactctaccgattccaccagtggattaatgggctgggcaatcccggctctgacacgctggatatgctgcgccagcagacactcacggccgacagactggcctccgtgatggggctggacatcagtatggtaacgcaggccatggtttccgccggcgtgaaccagcttcagtgttggcaggatatcaacaccgtgttgcagtggatagatgtggcatcagcactgcacacgatgccgtcggttatccgtacgctggtgaatatccgttacgtgactgcattaaacaaagccgagtcgaatctgccttcctgggatgagtggcagacactggcagaaaatatggaagccggactcagtacacaacaggctcagacgctggcggattataccgcggagcgcttgagtagcgtgctgtgcaattggtttctggcgaatatccagccagaaggggtgtccctgcacagccgggatgacctgtacagctatttcctgattgataatcaggtctcttctgccataaaaaccacccgactggcagaggccattgccggtattcagctctacatcaaccgggcgctgaatcggatagagcctaatgcccgtgccgatgtgtcaacccgccagttttttaccgactggacggtgaataaccgttacagcacctggggcggggtgtcgcggctggtttattatccggaaaattacattgacccaacccagcgtatcgggcagacccggatgatggatgaactgctggaaaatatcagccagagtaaacttagccgggacacagtggaggatgcctttaaaacttacctgacccgctttgaaaccgtggcggatctgaaagttgtcagcgcctatcacgacaacgtcaacagcaacaccggactgacctggtttgtcggccaaacgcgggagaacctgccggaatactactggtgtaacgtggatatatcacggatgcaggcgggtgaactggccgccaatgcctggaaagagtggacgaagattgatacagcggtcaacccctacaaggatgcaatacgtccggtcatactcagggaacgtttgcaccttatctgggtagaaaaagaggaagtggcgaaaaatggtactgatccggtggaaacctgtgaccgttttactctgaaactggcgtttctgcgtcatgatggcagttggagtgccccctggtcttacgatatcacaacgcaggtggaggcggtcactgacaaaaaacctgacactgaacggctggcgctggccgcatcaggctttcagggcgaggacactctgctggtgtttgtctacaaaaccgggaagagttactcggattttggcggcagcaataaaaatgtggcaggcatgaccatttacggcgatggctccttcaaaaagatggagaacacagcactcagccgttacagccaactgaaaaatacctttgatatcattcatactcaaggcaacgacttggtaagaaaggccagctatcgtttcgcgcaggattttgaagtgcctgcctcgttgaatatgggttctgccatcggtgatgatagtctgacggtgatggagaacgggaatattccgcagataaccagtaaatactccagcgataaccttgctattacgctacataacgccgctttcactgtcagatatgatggcagtggcaatgtcatcagaaacaaacaaatcagcgccatgaaactgacgggggtggatggaaagtcccagtacggcaatgcatttatcatcgcaaataccgttaaacattatggcggttactctgatctgggggggccgatcaccgtttataataaaacgaaaaactatattgcatcagttcaaggccacttgatgaacgcagattacactaggcgtttgattctaacaccagttgaaaataattattatgccagattgttcgagtttccattttctccaaacacaattttaaacaccgttttcacggttggtagcaataaaaccagtgattttaaaaagtgcagttatgctgttgatggtaataattctcagggcttccagatatttagttcctatcaatcatccggctggctggatattgatacaggcattaacaataccgatatcaaaattacggtgatggctggcagtaaaacccacacctttacggccagtgaccatattgcttccttgccggcaaacagttttgatgctatgccgtacacctttaagccactggaaatcgatgcttcatcgttggcctttaccaataatattgctcctctggatatcgtttttgagaccaaagccaaagacgggcgagtgctgggtaagatcaagcaaacattatcggtgaaacgggtaaattataatccggaagatattctgtttctgcgtgaaactcattcgggtgcccaatatatgcagctcggggtgtatcgtattcgtcttaataccctgctggcttctcaactggtatccagagcaaacacgggcattgatactatcctgacaatggaaacccagcggttaccggaacctccgttgggagaaggcttctttgccaactttgttctgcctaaatatgaccctgctgaacatggcgatgagcggtggtttaaaatccatattgggaatgttggcggtaacacgggaaggcagccttattacagcggaatgttatccgatacgtcggaaaccagtatgacactgtttgtcccttatgccgaagggtattacatgcatgaaggtgtcagattgggggttggataccagaaaattacctatgacaacacttgggaatctgctttcttttattttgatgagacaaaacagcaatttgtattaattaacgatgctgatcatgattcaggaatgacgcaacaggggatcgtgaaaaatatcaagaaatacaaaggatttttgaatgtttctatcgcaacgggctattccgccccgatggatttcaatagtgccagcgccctctattactgggaattgttctattacaccccgatgatgtgcttccagcgtttgctacaggaaaaacaattcgacgaagccacacaatggataaactacgtctacaatcccgccggctatatcgttaacggagaaatcgccccctggatctggaactgccggccgctggaagagaccacctcctggaatgccaatccgctggatgccatcgatccggatgccgtcgcccaaaatgacccaatgcactacaagattgccacctttatgcgcctgttggatcaacttattctgcgcggcgatatggcctatcgagaactgacccgcgatgcgttgaatgaagccaaaatgtggtatgtgcgtactttagaattgctcggtgatgagccggaggattacggtagccaacagtgggcagcaccgtccctttccggggcggcgagtcaaaccgtgcaggcggcttatcagcaggatcttacgatgctgggccgtggtggggtttccaagaatctccgtaccgctaactcgttggtgggtttgttcctgccggaatataacccggcgctcaccgattactggcaaaccctgcgtttgcgcctgtttaacctgcgccataatctttccattgacggacagccgttatcgctggcgatttacgccgagcctaccgatccgaaagcgctgctcaccagtatggtacaggcctctcagggcggtagtgcagtgctgcccggcacattgtcgttataccgcttcccggtgatgctggagcggacccgcaatctggtagcgcaattaacccagttcggcacctctctgctcagtatggcagagcatgatgatgccgatgaactcaccacgctgctactacagcagggtatggaactggcgacacagagcatccgtattcagcaacgaactgtcgatgaagtggatgctgatattgctgtattggcagagagccgccgcagtgcacaaaatcgtctggaaaaataccagcagctgtatgacgaggatatcaaccacggagaacagcgggcaatgtcactgcttgatgcagcggcaggtcagtctctggccgggcaggtgctttcaatagcggaaggggtggccgatttagtgccaaacgtgttcggtttagcttgtggcggcagtcgttggggggcagcactgcgtgcttccgcctccgtgatgtcgctttctgccacagcttcccaatattccgcagacaaaatcagccgttcggaagcctaccgccgccgccgtcaggagtgggaaattcagcgtgataatgctgacggtgaagtcaaacaaatggatgcccagttggaaagcctgaaaatccgccgcgaagcagcacagatgcaggtggaatatcaggagacccagcaggcccatactcaggctcagttagagctgttacagcgtaaattcacaaacaaagcgctttacagttggatgcgcggcaagctgagtgctatctattaccagttctttgacctgacccagtccttctgcctgatggcacaggaagcgctgcgccgcgagctgaccgacaacggtgttacctttatccggggtggggcctggaacggtacgactgcgggtttgatggcgggtgaaacgttgctgctgaatctggcagaaatggaaaaagtctggctggagcgtgatgagcgggcactggaagtgacccgtaccgtctcgttggcacagttctatcaggccttatcatcagacaactttaatctgaccgaaaaactcacgcaattcctgcgtgaagggaaaggcaacgtaggagcttccggcaatgaattaaaactcagtaaccgtcagatagaagcctcagtgcgattgtctgatttgaaaattttcagcgactaccccgaaagccttggcaatacccgtcagttgaaacaggtgagtgtcaccttgccggcgctggttgggccgtatgaagatattcgggcggtgctgaattacgggggcagcatcgtcatgccacgcggttgcagtgctattgctctctcccacggcgtgaatgacagtggtcaatttatgctggatttcaacgattcccgttatctgccgtttgaaggtatttccgtgaatgacagcggcagcctgacgttgagtttcccggatgcgactgatcggcagaaagcgctgctggagagcctgagcgatatcattctgcatatccgctataccattcgttcttaattaatgctctcgag

SEQ ID NO: 68 - protein, 5001 aa, Artificial Sequence
  Amino acid sequence of the 8836 "BCA" triple fusion protein encoded by SEQ ID NO:67
MQNSQDFSITELSLPKGGGAITGMGEALTPTGPDGMAALSLPLPISAGRGYAPAFTLNYNSGAGNSPFGLGWDCNVMTIRRRTHFGVPHYDETDTFLGPEGEVLVVADQPRDESTLQGINLGATFTVTGYRSRLESHFSRLEYWQPKTTGKTDFWLIYSPDGQVHLLGKSPQARISNPSQTTQTAQWLLEASVSSRGEQIYYQYRAEDDTGCEADEITHHLQATAQRYLHIVYYGNRTASETLPGLDGSAPSQADWLFYLVFDYGERSNNLKTPPAFSTTGSWLCRQDRFSRYEYGFEIRTRRLCRQVLMYHHLQALDSKITEHNGPTLVSRLILNYDESAIASTLVFVRRVGHEQDGNVVTLPPLELAYQDFSPRHHAHWQPMDVLANFNAIQRWQLVDLKGEGLPGLLYQDKGAWWYRSAQRLGEIGSDAVTWEKMQPLSVIPSLQSNASLVDINGDGQLDWVITGPGLRGYHSQRPDGSWTRFTPLNALPVEYTHPRAQLADLMGAGLSDLVLIGPKSVRLYANTRDGFAKGKDVVQSGDITLPVPGADPRKLVAFSDVLGSGQAHLVEVSATKVTCWPNLGRGRFGQPITLPGFSQPATEFNPAQVYLADLDGSGPTDLIYVHTNRLDIFLNKSGNGFAEPVTLRFPEGLRFDHTCQLQMADVQGLGVASLILSVPHMSPHHWRCDLTNMKPWLLNEMNNNMGVHHTLRYRSSSQFWLDEKAAALTTGQTPVCYLPFPIHTLWQTETEDEISGNKLVTTLRYARGAWDGREREFRGFGYVEQTDSHQLAQGNAPERTPPALTKNWYATGLPVIDNALSTEYWRDDQAFAGFSPRFTTWQDNKDVPLTPEDDNSRYWFNRALKGQLLRSELYGLDDSTNKHVPYTVTEFRSQVRRLQHTDSRYPVLWSSVVESRNYHYERIASDPQCSQNITLSSDRFGQPLKQLSVQYPRRQQPAINLYPDTLPDKLLANSYDDQQRQLRLTYQQSSWHHLTNNTVRVLGLPDSTRSDIFTYGAENVPAGGLNLELLSDKNSLIADDKPREYLGQQKTAYTDGQNTTPLQTPTRQALIAFTETTVFNQSTLSAFNGSIPSDKLSTTLEQAGYQQTNYLFPRTGEDKVWVAHHGYTDYGTAAQFWRPQKQSNTQLTGKITLIWDANYCVVVQTRDAAGLTTSAKYDWRFLTPVQLTDINDNQHLITLDALGRPITLRFWGTENGKMTGYSSPEKASFSPPSDVNAAIELKKPLPVAQCQVYAPESWMPVLSQKTFNRLAEQDWQKLYNARIITEDGRICTLAYRRWVQSQKAIPQLISLLNNGPRLPPHSLTLTTDRYDHDPEQQIRQQVVFSDGFGRLLQAAARHEAGMARQRNEDGSLIINVQHTENRWAVTGRTEYDNKGQPIRTYQPYFLNDWRYVSNDSARQEKEAYADTHVYDPIGREIKVITAKGWFRRTLFTPWFTVNEDENDTAAEVKKVKMPGSDNKGQTIRTRPMKNIDPKLYQKTPTVSVYDNRGLIIRNIDFHRTTANGDPDTRITRHQYDIHGHLNQSIDPRLYEAKQTNNTIKPNFLWQYDLTGNPLCTESIDAGRTVTLNDIEGRPLLTVTATGVIQTRQYETSSLPGRLLSVAEQTPEEKTSRITERLIWAGNTEAEKDHNLAGQCVRHYDTAGVTRLESLSLTGTVLSQSSQLLIDTQEANWTGDNETVWQNMLADDIYTTLSTFDATGALLTQTDAKGNIQRLAYDVAGQLNGSWLTLKGQTEQVIIKSLTYSAAGQKLREEHGNDVITEYSYEPETQRLIGIKTRRPSDTKVLQDLRYEYDPVGNVISIRNDAEATRFWHNQKVMPENTYTYDSLYQLISATGREMANIGQQSHQFPSPALPSDNNTYTNYTRTYTYDRGGNLTKIQHSSPATQNNYTTNITVSNRSNRAVLSTLTEDPAQVDALFDAGGHQNTLISGQNLNWNTRGELQQVTLVKRDKGANDDREWYRYSGDGRRMLKINEQQASNNAQTQRVTYLPNLELRLTQNSTATTEDLQVITVGEAGRAQVRVLHWESGKPEDIDNNQLRYSYDNLIGSSQLELDSEGQIISEEEYYPYGGTALWAARNQTEASYKTIRYSGKERDATGLYYYGYRYYQPWIGRWLSSDPAGTIDGLNLYRMVRNNPVTLLDPDGLMPTIAERIAALKKNKVTDSAPSPANATNVAINIRPPVAPKPSLPKASTSSQPTTHPIGAANIKPTTSGSSIVAPLSPVGNKSTSEISLPESAQSSSSSTTSTNLQKKSFTLYRADNRSFEEMQSKFPEGFKAWTPLVTKMARQFASIFIGQKDTSNLPKETVKNISTWGAKPKLKDLSNYIKYTKDKSTVWVSTAINTEAGGQSSGAPLHKIDMDLYEFAIDGQKLNPLPEGRTKNMVPSLLLDTPQIETSSIIALNHGPVNDAEISFLTTIPLKNVKPHKRPRDNKGQTIRTRPEFMYSTAVLLNKISPTRDGQTMTLADLQYLSFSELRKIFDDQLSWGEARHLYHETIEQKKNNRLLEARIFTRANPQLSGAIRLGIERDSVSRSYDEMFGARSSSFVKPGSVASMFSPAGYLTELYREAKDLHFSSSAYHLDNRRPDLADLTLSQSNMDTEISTLTLSNELLLEHITRKTGGDSDALMESLSTYRQAIDTPYHQPYETIRQVIMTHDSTLSALSRNPEVMGQAEGASLLAILANISPELYNILTEEITEKNADALFAQNFSENITPENFASQSWIAKYYGLELSEVQKYLGMLQNGYSDSTSAYVDNISTGLVVNNESKLEAYKITRVKTDDYDKNINYFDLMYEGNNQFFIRANFKVSREFGATLRKNAGPSGIVGSLSGPLIANTNFKSNYLSNISDSEYKNGVKIYAYRYTSSTSATNQGGGIFTFESYPLTIFALKLNKAIRLCLTSGLSPNELQTIVRSDNAQGIINDSVLTKVFYTLFYSHRYALSFDDAQVLNGSVINQYADDDSVSHFNRLFNTPPLKGKIFEADGNTVSIDPDEEQSTFARSALMRGLGVNSGELYQLGKLAGVLDAQNTITLSVFVISSLYRLTLLARVHQLTVNELCMLYGLSPFNGKTTASLSSGELPRLVIWLYQVTQWLTEAEITTEAIWLLCTPEFSGNISPEISNLLNNLRPSISEDMAQSHNRELQAEILAPFIAATLHLASPDMARYILLWTDNLRPGGLDIAGFMTLVLKESLNANETTQLVQFCHVMAQLSLSVQTLRLSEAELSVLVISGFAVLGAKNQPAGQHNIDTLFSLYRFHQWINGLGNPGSDTLDMLRQQTLTADRLASVMGLDISMVTQAMVSAGVNQLQCWQDINTVLQWIDVASALHTMPSVIRTLVNIRYVTALNKAESNLPSWDEWQTLAENMEAGLSTQQAQTLADYTAERLSSVLCNWFLANIQPEGVSLHSRDDLYSYFLIDNQVSSAIKTTRLAEAIAGIQLYINRALNRIEPNARADVSTRQFFTDWTVNNRYSTWGGVSRLVYYPENYIDPTQRIGQTRMMDELLENISQSKLSRDTVEDAFKTYLTRFETVADLKVVSAYHDNVNSNTGLTWFVGQTRENLPEYYWCNVDISRMQAGELAANAWKEWTKIDTAVNPYKDAIRPVILRERLHLIWVEKEEVAKNGTDPVETCDRFTLKLAFLRHDGSWSAPWSYDITTQVEAVTDKKPDTERLALAASGFQGEDTLLVFVYKTGKSYSDFGGSNKNVAGMTIYGDGSFKKMENTALSRYSQLKNTFDIIHTQGNDLVRKASYRFAQDFEVPASLNMGSAIGDDSLTVMENGNIPQITSKYSSDNLAITLHNAAFTVRYDGSGNVIRNKQISAMKLTGVDGKSQYGNAFIIANTVKHYGGYSDLGGPITVYNKTKNYIASVQGHLMNADYTRRLILTPVENNYYARLFEFPFSPNTILNTVFTVGSNKTSDFKKCSYAVDGNNSQGFQIFSSYQSSGWLDIDTGINNTDIKITVMAGSKTHTFTASDHIASLPANSFDAMPYTFKPLEIDASSLAFTNNIAPLDIVFETKAKDGRVLGKIKQTLSVKRVNYNPEDILFLRETHSGAQYMQLGVYRIRLNTLLASQLVSRANTGIDTILTMETQRLPEPPLGEGFFANFVLPKYDPAEHGDERWFKIHIGNVGGNTGRQPYYSGMLSDTSETSMTLFVPYAEGYYMHEGVRLGVGYQKITYDNTWESAFFYFDETKQQFVLINDADHDSGMTQQGIVKNIKKYKGFLNVSIATGYSAPMDFNSASALYYWELFYYTPMMCFQRLLQEKQFDEATQWINYVYNPAGYIVNGEIAPWIWNCRPLEETTSWNANPLDAIDPDAVAQNDPMHYKIATFMRLLDQLILRGDMAYRELTRDALNEAKMWYVRTLELLGDEPEDYGSQQWAAPSLSGAASQTVQAAYQQDLTMLGRGGVSKNLRTANSLVGLFLPEYNPALTDYWQTLRLRLFNLRHNLSIDGQPLSLAIYAEPTDPKALLTSMVQASQGGSAVLPGTLSLYRFPVMLERTRNLVAQLTQFGTSLLSMAEHDDADELTTLLLQQGMELATQSIRIQQRTVDEVDADIAVLAESRRSAQNRLEKYQQLYDEDINHGEQRAMSLLDAAAGQSLAGQVLSIAEGVADLVPNVFGLACGGSRWGAALRASASVMSLSATASQYSADKISRSEAYRRRRQEWEIQRDNADGEVKQMDAQLESLKIRREAAQMQVEYQETQQAHTQAQLELLQRKFTNKALYSWMRGKLSAIYYQFFDLTQSFCLMAQEALRRELTDNGVTFIRGGAWNGTTAGLMAGETLLLNLAEMEKVWLERDERALEVTRTVSLAQFYQALSSDNFNLTEKLTQFLREGKGNVGASGNELKLSNRQIEASVRLSDLKIFSDYPESLGNTRQLKQVSVTLPALVGPYEDIRAVLNYGGSIVMPRGCSAIALSHGVNDSGQFMLDFNDSRYLPFEGISVNDSGSLTLSFPDATDRQKALLESLSDIILHIRYTIRS

We claim:

1. An isolated fusion protein comprising a toxin complex Class B polypeptide and a toxin complex Class C polypeptide wherein:
said Class B polypeptide is a 130-180 kDa potentiator having an amino acid sequence at least 40% identical to a sequence selected from the group consisting of
TcdB1 (SEQ ID NO:5),
TcdB2 (SEQ ID NO:6),
TcaC (SEQ ID NO:7),
XptC1_{wi} (SEQ ID NO:8),
XptB1_{xb} (SEQ ID NO:9),
PptB1₁₅₂₉ (SEQ ID NO:10),and
Sep B (SEQ ID NO:11); and
said Class C polypeptide is a 90-112 kDa potentiator having an amino acid sequence at least 35% identical to a sequence selected from the group consisting of
TccC1 (SEQ ID NO: 12),
TccC2 (SEQ ID NO: 13),
TccC3 (SEQ ID NO: 14),
TccC4 (SEQ ID NO: 15),
TccC5 (SEQ ID NO: 16),
XptB1_{wi} (SEQ ID NO: 17),
XptC1_{xb} (SEQ ID NO: 18),
PptC1(long) (SEQ ID NO: 19),
PptC1(short) (SEQ ID NO: 20), and
SepC (SEQ ID NO: 21); and
said Class B and said Class C polypeptides are capable of enhancing the insecticidal activity of a 230-290 kDa Class A toxin complex polypeptide.

2. The fusion protein of claim 1 wherein said fusion protein further comprises said Class A toxin complex polypeptide, and said fusion protein has toxin activity.

3. The fusion protein of claim 2 wherein said Class A polypeptide has an amino acid sequence at least 40% identical to a sequence selected from
XptA1_{wi} (SEQ ID NO: 22),
XptA2_{wi} (SEQ ID NO: 23),
TcbA (SEQ ID NO:24),
TcdA (SEQ ID NO:25),
TcdA2 (SEQ ID NO:26), and
TcdA4(SEQ ID NO:27).

4. The fusion protein of claim 1 wherein said Class B TC polypeptide and said Class C TC polypeptide are fused by a linker sequence.

5. The fusion protein of claim 1 wherein said Class B TC polypeptide and said Class C TC polypeptide are fused directly without a linker sequence.

6. The fusion protein of claim 1 wherein said Class B TC polypeptide is located at the amino terminus of said Class C TC polypeptide.

7. The fusion protein of claim 1 wherein said Class C TC polypeptide is located at the amino terminus of said Class B TC polypeptide.

8. The fusion protein of claim 1 wherein said fusion protein comprises an amino acid sequence selected from SEQ ID NOs:2, 46, 48, 50, 54, 56, and 58.

9. The fusion protein of claim 2 wherein said fusion protein comprises an amino acid sequence selected from SEQ ID NO:60 and SEQ ID NO:68.

10. The fusion protein of claim 1 wherein a polynucleotide that codes for said Class B TC polypeptide hybridizes under stringent conditions with the complement of a nucleic acid molecule selected from SEQ ID NOs:28-33, and wherein a polynucleotide that codes for said Class C TC polypeptide hybridizes under stringent conditions with the complement of a nucleic acid molecule selected from SEQ ID NOs:34-42.

11. The fusion protein of claim 2 wherein a polynucleotide that codes for said Class A polypeptide hybridizes under stringent conditions with the complement of a nucleic acid molecule selected from SEQ ID NOs:61-66.

12. The fusion protein of claim 2 wherein said Class A polypeptide has at least 75% sequence identity with an amino acid sequence selected from the group consisting of SEQ ID NOs:22-27, said Class C polypeptide has at least 75% sequence identity with an amino acid sequence selected from the group consisting of SEQ ID NOs:12-21, and said Class B polypeptide has at least 75% sequence identity with an amino acid sequence selected from SEQ ID NOs:5-11.

13. The fusion protein of claim 2 wherein said Class B polypeptide is TcdB2 and said Class C polypeptide is TccC3.

14. The fusion protein of claim 2 wherein said Class B TC polypeptide is located at the amino terminal side of said Class C TC polypeptide, and said Class C polypeptide is located at the amino terminal side of said Class A TC polypeptide.

15. The fusion protein of claim 2 wherein said fusion protein comprises a linker sequence.

16. The fusion protein of claim 2 wherein said Class A polypeptide is fused directly to said Class B polypeptide without a linker sequence.

17. The fusion protein of claim 2 wherein said Class A TC polypeptide and said Class B polypeptide are fused by a linker sequence.

18. The fusion protein of claim 2 wherein said Class B TC polypeptide and said Class C TC polypeptide are fused by a linker sequence.

19. An isolated polynucleotide that encodes a fusion protein of claim 1.

20. The polynucleotide of claim 19 wherein said polynucleotide is operably linked to a heterologous promoter.

21. An isolated polynucleotide that encodes a fusion protein of claim 2.

22. A transgenic bacterial or plant cell that comprises a polynucleotide of claim 19.

23. A seed comprising a plant cell of claim 22.

24. A plant that produces a fusion protein of claim 1.

25. A plant that produces a fusion protein of claim 2.

26. A method of preventing an insect from feeding on a plant wherein said method comprises providing, to said insect for ingestion, effective amounts of a Class A TC polypeptide and a fusion protein of claim 1.

27. A method of preventing an insect from eating a plant wherein said method comprises providing, to said insect for ingestion, an effective amount of a fusion protein of claim 2.

28. The method of claim 26 wherein said plant produces said protein.

29. The method of claim 26 wherein method comprises applying said protein to said plant.

30. A method of protecting a plant from damage by an insect wherein said method comprises producing in said plant effective amounts of Class A, Class B and Class C toxin complex proteins, wherein said Class B and Class C TC proteins are translated from a single open reading frame.

31. A method of producing a fusion protein of claim 1 wherein said method comprises ligating said Class B polypeptide to said Class C polypeptide.
